(19) United States
(12) Patent Application Publication
(10) Pub. No.: US 2025/0346906 A1
(43) Pub. Date: Nov. 13, 2025

(54) COMPOSITIONS AND METHODS FOR INHIBITING EXPRESSION OF CD274/PD-L1 GENE

(71) Applicant: Alnylam Pharmaceuticals, Inc., Cambridge, MA (US)

(72) Inventors: Antonin DeFougerolles, Cambridge, MA (US); Tatiana Novobrantseva, Cambridge, MA (US); Brian Bettencourt, Cambridge, MA (US)

(21) Appl. No.: 19/029,954

(22) Filed: Jan. 17, 2025

Related U.S. Application Data
(63) Continuation of application No. 18/771,149, filed on Jul. 12, 2024, now abandoned.
Application No. 18/771,149 is a continuation of application No. 18/511,815, filed on Nov. 16, 2023, now abandoned.
Application No. 18/511,815 is a continuation of application No. 18/166,964, filed on Feb. 9, 2023, now abandoned.
Application No. 18/166,964 is a continuation of application No. 17/853,667, filed on Jun. 29, 2022, now abandoned.
Application No. 17/853,667 is a continuation of application No. 16/922,737, filed on Jul. 7, 2020, now abandoned.
Application No. 16/922,737 is a continuation of application No. 15/906,267, filed on Feb. 27, 2018, now Pat. No. 10,745,704.
Application No. 15/906,267 is a continuation of application No. 15/212,884, filed on Jul. 18, 2016, now Pat. No. 9,932,593.
Application No. 15/212,884 is a continuation of application No. 13/938,349, filed on Jul. 10, 2013, now Pat. No. 9,422,562.
Application No. 13/938,349 is a continuation of application No. 13/081,270, filed on Apr. 6, 2011, now Pat. No. 8,507,663.
(60) Provisional application No. 61/321,263, filed on Apr. 6, 2010.

(51) Int. Cl. C12N 15/113; A61K 31/713

(52) U.S. Cl. CPC C12N 15/1138; A61K 31/713; C12N 2310/14; C12N 2310/315; C12N 2310/321; C12N 2320/30; Y02A 50/30

(57) ABSTRACT

The invention relates to double-stranded ribonucleic acid (dsRNA) compositions targeting the CD274/PD-L1 gene, and methods of using such dsRNA compositions to inhibit expression of CD274/PD-L1.

### CROSS-REFERENCE TO RELATED APPLICATIONS

[0001] This application is a continuation application of co-pending U.S. patent application Ser. No. 18/771,149 filed on Jul. 12, 2024; which is a continuation application of U.S. patent application Ser. No. 18/511,815 filed on Nov. 16, 2023; which is a continuation application of U.S. patent application Ser. No. 18/166,964 filed on Feb. 9, 2023, now abandoned; which is a continuation application of U.S. patent application Ser. No. 17/853,667 filed on Jun. 29, 2022, now abandoned; which is a continuation application of U.S. patent application Ser. No. 16/922,737 filed on Jul. 7, 2020, now abandoned, which is a continuation application of U.S. patent application Ser. No. 15/906,267 filed on Feb. 27, 2018, now U.S. Pat. No. 10,745,704, issued Aug. 18, 2020, which is a continuation of U.S. patent application Ser. No. 15/212,884 filed on Jul. 18, 2016, now U.S. Pat. No. 9,932,593, issued Apr. 3, 2018, which is a continuation application of U.S. patent application Ser. No. 13/938,349 filed on Jul. 10, 2013, now U.S. Pat. No. 9,422,562, issued Aug. 23, 2016, which is a continuation application of U.S. patent application Ser. No. 13/081,270 filed on Apr. 6, 2011, now U.S. Pat. No. 8,507,663, issued Aug. 13, 2013, which claims benefit under 35 U.S.C. § 119(e) of U.S. Provisional Patent Application Ser. No. 61/321,263 filed on Apr. 6, 2010, the contents of each of which are incorporated herein by reference in their entireties.

### REFERENCE TO AN ELECTRONIC SEQUENCE LISTING

[0002] This application contains a Sequence Listing which has been submitted electronically in XML format and is hereby incorporated by reference in its entirety. Said XML copy, created on Aug. 1, 2025, is named 121301-25411.xml and is 6,783,067 bytes in size.

### FIELD OF THE INVENTION

[0003] The invention relates to the specific inhibition of the expression of the CD274/PD-L1 gene.

### BACKGROUND OF THE INVENTION

[0004] CD274 or PD-L1 is a 290 amino acid type I transmembrane protein encoded by the CD274 gene on mouse chromosome 19 and human chromosome 9. CD274/PD-L1 expression is implicated in evasion of immune responses involved in chronic infection, e.g., by viruses (including, for example, HIV, HBV, HCV and HTLV, among others), by bacteria (including, for example, Helicobacter pylori, among others) and by parasites (including, for example, Schistosoma mansoni).

[0005] CD274/PD-L1 expression is also implicated in suppression of anti-tumor immune activity. Tumors express antigens that can be recognized by host T cells, but immunologic clearance of tumors is rare. Part of this failure is due to immune suppression by the tumor microenvironment. PD-L1 expression on many tumors is a component of this suppressive milieu and may act in concert with other immunosuppressive signals. PD-L1 expression has been shown in situ on a wide variety of solid tumors including breast, lung, colon, ovarian, melanoma, bladder, liver, salivary, stomach, gliomas, thyroid, thymic epithelial, head, and neck (Brown J A et al., 2003. J. Immunol. 170:1257-66; Dong H et al. 2002. Nat. Med. 8:793-800; Hamanishi J, et al. 2007. Proc. Natl. Acad. Sci. USA 104:3360-65; Strome S E et al. 2003. Cancer Res. 63:6501-5; Inman B A et al. 2007. Cancer 109:1499-505; Konishi J et al. 2004. Clin. Cancer Res. 10:5094-100; Nakanishi J et al. 2007. Cancer Immunol. Immunother. 56:1173-82; Nomi T et al. 2007. Clin. Cancer Res. 13:2151-57; Thompson R H et al. 2004. Proc. Natl. Acad. Sci. USA 101:17174-79; Wu C, Zhu Y, Jiang J, Zhao J, Zhang X G, Xu N. 2006. Acta Histochem. 108:19-24). In addition, PD-1 expression is upregulated on tumor infiltrating lymphocytes, and this may also contribute to tumor immunosuppression (Blank C et al. 2003. J. Immunol. 171:4574-81). In ovarian cancer, PD-L1 expression is inversely correlated with intraepithelial, but not stromal, infiltrating CD8 T cells, suggesting that PD-L1 inhibits the intratumor migration of CD8 T cells (Hamanishi J et al. 2007. Proc. Natl. Acad. Sci. USA 104:3360-65). Translation of PD-L1 mRNA is enhanced by loss of PTEN and the ensuing activation of Akt, a common event in tumorigenesis (Parsa A T et al. 2007. Nat. Med. 13:84-88). Most importantly, studies relating PD-L1 expression on tumors to disease outcome show that PD-L1 expression strongly correlates with unfavorable prognosis in kidney, ovarian, bladder, breast, gastric, and pancreatic cancer (Hamanishi J et al. 2007. Proc. Natl. Acad. Sci. USA 104:3360-65; Inman B A et al. 2007. Cancer 109:1499-505; Konishi J et al. 2004. Clin. Cancer Res. 10:5094-100; Nakanishi J et al. 2007. Cancer Immunol. Immunother. 56:1173-82; Nomi T et al. 2007. Clin. Cancer Res. 13:2151-57; Thompson R H et al. 2004. Proc. Natl. Acad. Sci. USA 101:17174-79; Wu C, Zhu Y, Jiang J, Zhao J, Zhang X G, Xu N. 2006. Acta Histochem. 108:19-24). In addition, these studies suggest that higher levels of PD-L1 expression on tumors may facilitate advancement of tumor stage and invasion into deeper tissue structures.

[0006] The PD-1 pathway can also play a role in hematologic malignancies. PD-L1 is expressed on multiple myeloma cells but not on normal plasma cells (Liu J et al. 2007.Blood 110:296-304). PD-L1 is expressed on some primary T cell lymphomas, particularly anaplastic large cell T lymphomas (Brown J A et al., 2003. J. Immunol. 170:1257-66). PD-1 is highly expressed on the T cells of angioimmunoblastic lymphomas, and PD-L1 is expressed on the associated follicular dendritic cell network (Dorfman D M et al. 2006. Am. J. Surg. Pathol. 30:802-10). In nodular lymphocyte-predominant Hodgkin lymphoma, the T cells associated with lymphocytic and/or histiocytic (L&H) cells express PD-1. Microarray analysis using a readout of genes induced by PD-1 ligation suggests that tumor-associated T cells are responding to PD-1 signals in situ in Hodgkin lymphoma (Chemnitz J M et al. 2007. Blood 110:3226-33). PD-1 and PD-L1 are expressed on CD4 T cells in HTLV-1-mediated adult T cell leukemia and lymphoma (Shimauchi T et al. 2007. Int. J. Cancer 121: 2585-90). These tumor cells are hyporesponsive to TCR signals.

[0007] Studies in animal models demonstrate that PD-L1 on tumors inhibits T cell activation and lysis of tumor cells and in some cases leads to increased tumor-specific T cell death (Dong H et al. 2002. Nat. Med.8:793-800; Hirano F et al. 2005. Cancer Res.65:1089-96). Tumor-associated APCs can also utilize the PD-1:PD-L pathway to control antitumor T cell responses. PD-L1 expression on a population of tumor-associated myeloid DCs is upregulated by tumor environmental factors (Curiel T J et al. 2003. Nat. Med. 9:562-67). Plasmacytoid dendritic cells (DCs) in the tumor-draining lymph node of B16 melanoma express IDO, which strongly activates the suppressive activity of regulatory T cells. The suppressive activity of IDO-treated regulatory T cells required cell contact with IDO-expressing DCs (Sharma M D et al. 2007. J. Clin. Invest. 117:2570-82).

### SUMMARY OF THE INVENTION

[0008] Described herein are compositions and methods that affect the RNA-induced silencing complex (RISC)-mediated cleavage of RNA transcripts of the CD274/PD-L1 gene, such as in a cell or mammal. Also described are compositions and methods for treating pathological conditions and diseases caused by the expression of a CD274/PD-L1 gene, such as a tumor or hematological malignancy (e.g., ovarian cancer or melanoma), or an infectious disease (e.g., viral hepatitis).

[0009] As used herein, the term “iRNA” refers to an agent that contains RNA as that term is defined herein, and which mediates the targeted cleavage of an RNA transcript via an RNA-induced silencing complex (RISC) pathway. In one embodiment, an iRNA as described herein effects inhibition of CD274/PD-L1 expression in a cell or mammal. Alternatively, in another embodiment, an iRNA as described herein activates CD274/PD-L1 expression in a cell or mammal.

[0010] The iRNAs included in the compositions featured herein encompass a dsRNA having an RNA strand (the antisense strand) having a region that is 30 nucleotides or less, generally 19-24 nucleotides in length, that is substantially complementary to at least part of an mRNA transcript of a CD274/PD-L1 gene. In one embodiment, the dsRNA comprises a region of at least 15 contiguous nucleotides.

[0011] In one embodiment, an iRNA for inhibiting expression of a CD274/PD-L1 gene includes at least two sequences that are complementary to each other. The iRNA includes a sense strand having a first sequence and an antisense strand having a second sequence. The antisense strand includes a nucleotide sequence that is substantially complementary to at least part of an mRNA encoding CD274/PD-L1, and the region of complementarity is 30 nucleotides or less, and at least 15 nucleotides in length. Generally, the iRNA is 19 to 24, e.g., 19 to 21 nucleotides in length. In some embodiments the iRNA is from about 15 to about 25 nucleotides in length, and in other embodiments the iRNA is from about 25 to about 30 nucleotides in length. The iRNA, upon contacting with a cell expressing CD274/PD-L1, inhibits the expression of a CD274/PD-Llgene by at least 10%, at least 20%, at least 25%, at least 30%, at least 35% or at least 40% or more, such as when assayed by a method as described herein. In one embodiment, the CD274/PD-L1iRNA is formulated in a stable nucleic acid lipid particle (SNALP).

[0012] In one embodiment, an iRNA featured herein includes a first sequence of a dsRNA that is selected from the group consisting of the sense sequences of Table 2, Table 3, and Table 5, and a second sequence that is selected from the group consisting of the corresponding antisense sequences of Table 2, Table 3, and Table 5. The iRNA molecules featured herein can include naturally occurring nucleotides or can include at least one modified nucleotide, including, but not limited to a 2′-O-methyl modified nucleotide, a nucleotide having a 5′-phosphorothioate group, and a terminal nucleotide linked to a cholesteryl derivative. Alternatively, the modified nucleotide may be chosen from the group of: a 2′-deoxy-2′-fluoro modified nucleotide, a 2′-deoxy-modified nucleotide, a locked nucleotide, an abasic nucleotide, 2′-amino-modified nucleotide, 2′-alkyl-modified nucleotide, morpholino nucleotide, a phosphoramidate, and a non-natural base comprising nucleotide. Generally, such a modified sequence will be based on a first sequence of said iRNA selected from the group consisting of the sense sequences of Table 2, Table 3, and Table 5, and a second sequence selected from the group consisting of the corresponding antisense sequences of Table 2, Table 3, and Table 5.

[0013] In one embodiment, an iRNA as described herein targets a wildtype CD274/PD-L1 RNA transcript, and in another embodiment, the iRNA targets a mutant transcript (e.g., a CD274/PD-L1 RNA carrying an allelic variant). For example, an iRNA of the invention can target a polymorphic variant, such as a single nucleotide polymorphism (SNP), of CD274/PD-L1. In another embodiment, the iRNA targets both a wildtype and a mutant CD274/PD-L1 transcript. In yet another embodiment, the iRNA targets a transcript variant of CD274/PD-L1.

[0014] In one embodiment, an iRNA featured in the invention targets a non-coding region of a CD274/PD-L1 RNA transcript, such as the 5′ or 3′ untranslated region.

[0015] In one aspect, embodiments of the invention provide a cell containing at least one of the iRNAs featured in the invention. The cell is generally a mammalian cell, such as a human cell. In some embodiments, the cell is a cancer or tumor cell. In some embodiments, the cell is an immune cell.

[0016] In another aspect, embodiments of the invention provide a pharmaceutical composition for inhibiting the expression of CD274/PD-L1 gene in an organism, generally a human subject. The composition typically includes one or more of the iRNAs described herein and a pharmaceutically acceptable carrier or delivery vehicle. In one embodiment, the composition is used for treating a cancer or malignancy, such as a myeloma. In one embodiment, the composition is used for treating an infectious disease, such as a viral hepatitis infection.

[0017] In another embodiment, the pharmaceutical composition is formulated for administration of a dosage regimen described herein, e.g., not more than once every four weeks, not more than once every three weeks, not more than once every two weeks, or not more than once every week. In another embodiment, the administration of the pharmaceutical composition can be maintained for a month or longer, e.g., one, two, three, or six months, one year, or five years, or ten years, or longer, including the remaining lifetime of a subject.

[0018] In another embodiment, a composition containing an iRNA described herein, e.g., a dsRNA targeting CD274/PD-L1, is administered with a non-iRNA therapeutic agent, such as an agent known to treat a cancer, or a symptom of a cancer. In another embodiment, a composition containing an iRNA featured in the invention, e.g., a dsRNA targeting CD274/PD-L1, is administered along with a non-iRNA therapeutic regimen, such as immunotherapy. For example, an iRNA featured in the invention can be administered along with vaccination against a tumor peptide antigen agent for treatment of tumor or other malignancy. In another example, an iRNA featured in the invention can be administered along with depletion of a cell population, such as CD4 cells.

[0019] In another embodiment, a CD274/PD-L1iRNA is administered to a patient, and then the non-iRNA agent or therapeutic regimen is administered to the patient (or vice versa). In another embodiment, a CD274/PD-L1 iRNA and the non-iRNA therapeutic agent or therapeutic regimen are administered at the same time. In one embodiment, the therapeutic agent is, for example, a tumor peptide antigen agent, such as a myeloma peptide that increases melanoma-specific T cell responses. In another embodiment, the therapeutic regimen includes the depletion of CD4 cells from the patient.

[0020] In another aspect, provided herein is a method for inhibiting the expression of a CD274/PD-L1 gene in a cell by performing the following steps:
[0021] (a) introducing into the cell a double-stranded ribonucleic acid (dsRNA), wherein the dsRNA includes at least two sequences that are complementary to each other. The dsRNA has a sense strand having a first sequence and an antisense strand having a second sequence; the antisense strand has a region of complementarity that is substantially complementary to at least a part of an mRNA encoding CD274/PD-L1, and where the region of complementarity is 30 nucleotides or less, i.e., 15-30 nucleotides in length, and generally 19-24 nucleotides in length, and where the dsRNA, upon contact with a cell expressing CD274/PD-L1, inhibits expression of a CD274/PD-L1 gene by at least 10%, preferably at least 20%, at least 30%, at least 40% or more; and
[0022] (b) maintaining the cell produced in step (a) for a time sufficient to obtain degradation of the mRNA transcript of the CD274/PD-L1 gene, thereby inhibiting expression of a CD274/PD-L1 gene in the cell.

[0023] In another aspect, the invention provides methods and compositions useful for activating expression of a CD274/PD-L1 gene in a cell or mammal.

[0024] In another aspect, the invention provides a method for modulating the expression of a CD274/PD-L1 gene in a cell by performing the following steps:
[0025] (a) introducing into the cell a double-stranded ribonucleic acid (dsRNA), wherein the dsRNA includes at least two sequences that are complementary to each other. The dsRNA has a sense strand having a first sequence and an antisense strand having a second sequence; the antisense strand has a region of complementarity that is substantially complementary to at least a part of an mRNA encoding CD274/PD-L1, and where the region of complementarity is 30 nucleotides or less, i.e., 15-30 nucleotides in length, and generally 19-24 nucleotides in length, and where the dsRNA, upon contact with a cell expressing CD274/PD-L1, modulates expression of a CD274/PD-L1 gene by at least 10%, preferably at least 20%, at least 30%, at least 40% or more; and
[0026] (b) maintaining the cell produced in step (a) for a time sufficient to obtain degradation or increased expression of the mRNA transcript of the CD274/PD-L1 gene, thereby modulating expression of a CD274/PD-L1 gene in the cell.

[0027] In one embodiment, the method is for inhibiting gene expression in an antigen-presenting cell, a macrophage, a T cell, an NK cell, an NKT cell, a myeloid dendritic cell, a B cell, an epithelial cell, a vascular endothelial cell, or any combination thereof.

[0028] In another embodiment, the method is for inhibiting gene expression in a tumor cell, or a lymphoma cell.

[0029] In other aspects, the invention provides methods for treating, preventing, reversing, or managing pathological processes mediated by CD274/PD-L1 expression, such as a tumor or other malignancy. In one embodiment, the method includes administering to a patient in need of such treatment, prevention, reversal, or management a therapeutically or prophylactically effective amount of one or more of the iRNAs featured in the invention. In one embodiment, the patient has a tumor or a hematological malignancy. In another embodiment, administration of the iRNA targeting CD274/PD-L1 alleviates or relieves the severity of at least one symptom of a CD274/PD-L1-mediated disorder in the patient, such as high tumor burden, development of metastasis, or tumor or lymphoma cell proliferation.

[0030] In one aspect, the invention provides a vector for inhibiting the expression of a CD274/PD-L1 gene in a cell. In one embodiment, the vector includes at least one regulatory sequence operably linked to a nucleotide sequence that encodes at least one strand of an iRNA as described herein. In another such aspect, the invention provides a vector encoding a dsRNA that targets a CD274/PD-L1 mRNA for cleavage, the dsRNA comprising on one strand a region of complementarity to said CD274/PD-L1 mRNA, the region of complementarity providing a double-stranded region of said dsRNA of 30 base pairs or less in length.

[0031] In another aspect, the invention provides a cell containing a vector for inhibiting the expression of a CD274/PD-L1 gene in a cell. The vector includes a regulatory sequence operably linked to a nucleotide sequence that encodes at least one strand of one of the iRNAs as described herein.

[0032] In yet another aspect, the invention provides a composition containing a CD274/PD-L1iRNA, in combination with a second iRNA targeting a second gene involved in a pathological disease, and useful for treating the disease, e.g., a tumor or a hematological malignancy. For example, the second gene can be the gene encoding PD-1, i.e., PDCD1.

[0033] The details of various embodiments of the invention are set forth in the description below. Other features, objects, and advantages of the invention will be apparent from the description and the drawings, and from the claims.

### DESCRIPTION OF THE DRAWINGS

[0034] FIG. 1 is the sequence of human CD274/PD-L1 mRNA (Ref. Seq. NM_014143.2, SEQ ID NO: 869).

[0035] FIG. 2 is a sequence of mouse CD274/PD-L1 mRNA (Ref. Seq. NM_021893.2; SEQ ID NO: 870).

[0036] FIG. 3 is a sequence of rat CD274/PD-L1 mRNA, isoform 1 (Ref. Seq. XM_001079572.1; SEQ ID NO: 871).

[0037] FIG. 4 is a sequence of rat CD274/PD-L1 mRNA, isoform 2 (Ref. Seq. XM_574652.2; SEQ ID NO: 872).

[0038] FIGS. 5A-5B depict representative experimental expression data using the various inhibitory duplexes of Table 5 (SEQ ID NOs: 877-924), comparing 0.1 nM and 10 nM concentrations.

### DETAILED DESCRIPTION OF THE INVENTION

[0039] Described herein are iRNAs and methods of using them for inhibiting the expression of a CD274/PD-L1 gene in a cell or a mammal where the iRNA targets a CD274/PD-L1 gene. Also provided are compositions and methods for treating pathological conditions and diseases, such as a cancer or infectious disease, in a mammal caused by or modulated by the expression of a CD274/PD-L1 gene. iRNA directs the sequence-specific degradation of mRNA through a process known as RNA interference (RNAi). In one embodiment, the iRNA activates the expression of a CD274/PD-L1 gene in a cell or mammal, where the iRNA targets a CD274/PD-L1 gene.

### CD274/PD-L1

[0040] CD274/PD-L1 comprises seven exons, the first of which is noncoding and contains the 5′UTR. The next three exons contain the signal sequence, IgV-like domain, and IgC-like domains, respectively. The transmembrane domain and the intracellular domains are contained in the next two exons (exons 5 and 6). The last exon contains intracellular domain residues plus the 3′UTR. The intracellular domain of CD274/PD-L1 is short, only about 30 aa, and highly conserved in all reported species. There is no known function for the intracellular tail of CD274/PD-L1. There is one reported splice variant of CD274/PD-L1 in humans consisting of a sequence lacking the IgV-like domain encoded in exon 2. This mutant should not be able to bind PD-1, although the function of this splice variant has not yet been reported. No splice variants have been identified for mouse CD274/PD-L1. The binding interface of CD274/PD-L1 to one of its known ligands, PD-1, is via its IgV-like domain (Keir M E et al., 2008. Annu Rev Immunol. 26:677-704).

[0041] CD274/PD-L1 has been shown to be constitutively expressed on mouse T and B cells, DCs, macrophages, mesenchymal stem cells, and bone marrow-derived mast cells. CD274/PD-L1 expression is also found on a wide range of nonhematopoietic cells and is upregulated on a number of cell types after activation. Upon IFN-γ stimulation, PD-L1 is expressed on T cells, NK cells, macrophages, myeloid DCs, B cells, epithelial cells, and vascular endothelial cells (Flies DB and Chen L 2007: J Immunother. 30 (3): 251-60). PD-L1 is notably expressed on macrophages. In the mouse, it has been shown that classically activated macrophages (induced by type I helper T cells or a combination of LPS and interferon-gamma) greatly upregulate PD-L1 (Loke P and Allison JP, 2003: Proc. Natl. Acad. Sci. U.S.A. 100 (9): 5336-41). Alternatively, macrophages activated by IL-4 (alternative macrophages), slightly upregulate PD-L1, while greatly upregulating PD-L2. It has been shown by STAT1-deficient knock-out mice that STAT1 is mostly responsible for upregulation of PD-L1 on macrophages by LPS or interferon-gamma, but is not at all responsible for its constitutive expression before activation in these mice. Both type I and type II interferons (IFNs) upregulate PD-L1. Analyses of the human CD274/PD-L1 promoter demonstrate that both constitutive and inducible CD274/PD-L1 expression are dependent on two IFN regulatory factor-1 (IRF-1) binding sites that are between 200 and 320 bp upstream of the transcriptional start site, and these IRF-1 binding sites are also found in mouse. Several studies have examined which signaling pathways are required for PD-L1 expression by using pharmacological inhibitors. PD-L1 expression in cell lines is decreased when MyD88, TRAF6, and MEK are inhibited. JAK2 has also been implicated in PD-L1 induction. Loss or inhibition of phosphatase and tensin homolog (PTEN), a cellular phosphatase that modifies phosphatidylinositol 3-kinase (PI3K) and Akt signaling, increases post-transcriptional PD-L1 expression in cancers (Keir M E et al., 2008. Annu Rev Immunol. 26:677-704).

[0042] PD-L1 can influence immune responses by engaging PD-1 or B7-1 (CD80) and modifying TCR or BCR signaling, but can also deliver signals into PD-L1 expressing cells, i.e., reverse signaling through PD-L1. Surface plasmon resonance studies demonstrate specific and unique interaction between both PD-L1 and B7-1, with an affinity of 1.7 μM, and an affinity of 0.5 M for the interaction between PD-L1 and PD-1. Chemical cross-linking studies indicate that PD-L1 and B7-1, like PD-L1 and PD-1, can also interact through their IgV-like domains. The PD-L1:B7-1 interface overlaps at least partially with the putative PD-L1:PD-1 interface. B7-1:PD-L1 interactions can induce an inhibitory signal into T cells. Ligation of PD-L1 on CD4 T cells by B7-1, or ligation of B7-1 on CD4 T cells by PD-L1, delivers a functionally significant, inhibitory signal. Because both PD-L1 and B7-1 are expressed on T cells, B cells, DCs, and macrophages, there is the potential for bidirectional interactions between B7-1 and PD-L1 on these cell types. In addition, PD-L1 on nonhematopoietic cells may interact with B7-1 as well as PD-1 on T cells to regulate cells (Keir M E et al., 2008. Annu Rev Immunol. 26:677-704).

[0043] PD-1 and its ligands have important roles in regulating immune defenses against microbes that cause acute and chronic infections. The PD-1:PD-L pathway appears to be a key determinant of the outcome of infection, regulating the delicate balance between effective antimicrobial immune defenses and immune-mediated tissue damage.

[0044] A number of microorganisms that cause chronic infection appear to have exploited the PD-1:PD-L pathway to evade the immune responses and establish persistent infection. Studies in the lymphocytic choriomeningitis virus (LCMV) model of chronic viral infection were the first to show a role for the PD-1:PD-L pathway during chronic infection (Barber D L et al. 2006. Nature 439:682-87). Viruses that cause chronic infections can render virus-specific T cells nonfunctional and thereby silence the antiviral T cell response (Wherry E J and Ahmed R. 2004. J. Virol. 78:5535-45). Functional dysregulation, or exhaustion, of CD8 T cells is an important reason for ineffective viral control during chronic infections and is characteristic of chronic LCMV infection in mice, as well as of HIV, HBV, HCV, and HTLV infection in humans and SIV infection in primates.

[0045] In chronic viral infections in humans, several groups have shown that PD-1 expression is high on HIV-specific (Petrovas C et al. 2006. J. Exp. Med. 203:2281-92; Day C L et al. 2006. Nature 443:350-54; Trautmann L et al. 2006. Nat. Med. 12:1198-202), HBV-specific (Boettler T et al. 2006. J. Virol. 80:3532-40; Boni C et al. 2007. J. Virol. 81:4215-25), and HCV-specific T cells (Urbani S et al. 2006. J. Virol. 80:11398-403). PD-L1 is also upregulated on peripheral blood CD14+ monocytes and myeloid DCs in patients with chronic HBV infection (Chen L et al. 2007. J. Immunol. 178:6634-41; Geng L et al. 2006. J. Viral Hepat. 13:725-33), and on CD14+ cells and T cells in HIV patients (Trabattoni D et al. 2003. Blood101:2514-20). Blocking PD-1:PD-L interactions in vitro reverses the exhaustion of HIV-specific, HBV-specific (Boni C et al. 2007. J. Virol. 81:4215-25), HCV-specific, and SIV-specific (Velu V et al. 2007. J. Virol.81:5819-28) CD8 and CD4 T cells and restores proliferation and cytokine production (Petrovas C et al. 2006. J. Exp. Med. 203:2281-92; Day C L et al. 2006. Nature 443:350-54; Trautmann L et al. 2006. Nat. Med. 12:1198-202; Urbani S et al. 2006. J. Virol. 80:11398-403). Recent work shows that the HCV core, a nucleocapsid protein, can upregulate PD-1 and PD-L1 expression on healthy donor T cells and that upregulation of PD-1 is mediated by interaction of the HCV core with the complement receptor C1QBP (Yao Z Q et al. 2007. Viral Immunol. 20:276-87).

[0046] The PD-1:PD-L pathway also may play a key role in the chronicity of bacterial infections. Helicobacter pylori causes chronic gastritis and gastroduodenal ulcers and is a risk factor for development of gastric cancer. During H. pylori infection, T cell responses are insufficient to clear infection, leading to persistent infection. Gastric epithelial cells express MHC class II molecules and are thought to have important APC (antigen-presenting cell) function during H. pylori infection. Following exposure to H. pylori in vitro or in vivo, PD-L1 also is upregulated on human gastric epithelial cells. Anti-PD-L1 blocking antibodies enhance T cell proliferation and IL-2 production in cultures of gastric epithelial cells exposed to H. pylori and CD4 T cells, suggesting that PD-L1 may play an important role in inhibiting T cell responses during H. pylori infection (Das S et al. 2006. J. Immunol. 176:3000-9). PD-L1 is upregulated in gastric mucosal biopsies from H. pylori-infected individuals, who show a marked increase in the CD4⁺CD25^{hi}FoxP3⁺ cell population. Naive T cells cultured with H. pylori-exposed gastric epithelial cells can develop into functional CD4⁺CD25^{hi}FoxP3⁺ regulatory T cells (Beswick E J, et al. 2007. Infect. Immun. 75:4334-41).

[0047] Parasitic worms also have exploited the PD-1:PD-L pathway to induce macrophages with strong suppressive function. During Taenia crassiceps infection in mice, PD-L1 and PD-L2 are upregulated on activated macrophages, and a high percentage of CD4 T cells express PD-1. Blockade of PD-Li, PD-L2, or PD-1 significantly decreased suppression of in vitro T cell proliferation by macrophages from Taenia-infected mice (Terrazas L I et al. 2005. Int. J. Parasitol. 35:1349-58). Similarly, during Schistosoma mansoni infection in mice, macrophages express high levels of PD-Li and more modest levels of PD-L2. Anti-PD-L1 completely abrogated the ability of these macrophages to suppress T cell proliferation in vitro, whereas anti-PD-L2 had no effect. PD-L1 expression on macrophages from infected mice declines after 12 weeks of infection, correlating with a break in T cell anergy (Smith P et al. 2004. J. Immunol. 173:1240-48). Thus, an emerging theme is that PD-L1 and PD-L2 can mediate the suppressive functions of macrophages during parasite infections.

[0048] PD-L1 and PD-L2 have distinct roles in the immune response to the protozoan parasite Leishmania mexicana. Cd274−/−129Sv mice showed resistance to L. mexicana, whereas Pdcd1lg2−/− mice developed exacerbated disease with increased parasite burdens. Cd274−/− mice exhibited a diminished Th2 response, which may explain the increased resistance of Cd274−/− mice. Pdcd1lg2−/− mice exhibited a marked increase in L. mexicana-specific IgM and IgG2a, which may contribute to the exacerbated disease observed in Pdcd1lg2−/− mice. Increased parasite-specific IgG production may suppress the healing response through FcγR ligation on macrophages.

[0049] Studies point to a role for PD-L1 in limiting immunopathology. Following infection with LCMV clone 13, WT mice develop a chronic infection, whereas Cd274−/− mice die (Barber D L et al. 2006. Nature 439:682-87). Bone marrow chimera studies point to an important role for PD-L1 on non-bone marrow-derived cells in limiting effector T cell responses and immunopathology.

[0050] The expression of PD-L1 on vascular endothelial cells has led to the hypothesis that PD-L1 on endothelial cells may regulate the activation of T cells that contact the vessel wall, the extravasation of T cells into tissue, and/or limit detrimental consequences of immunopathology. Cd274−/−Pdcd1lg2−/− mice developed severely increased atherosclerotic lesion burden, suggesting that PD-L1 also may play a significant role in inflammatory diseases in which vascular endothelium and T cells are important for pathogenesis (Gotsman I et al. 2007. J. Clin. Invest. 117:2974-82).

[0051] Double-stranded RNA molecules (dsRNA) have been shown to block gene expression in a highly conserved regulatory mechanism known as RNA interference (RNAi). WO 99/32619 (Fire et al.) disclosed the use of a dsRNA of at least 25 nucleotides in length to inhibit the expression of genes in C. elegans. dsRNA has also been shown to degrade target RNA in other organisms, including plants (see, e.g., WO 99/53050, Waterhouse et al.; and WO 99/61631, Heifetz et al.), Drosophila (see, e.g., Yang, D., et al., Curr. Biol. (2000) 10:1191-1200), and mammals (see WO 00/44895, Limmer; and DE 101 00 586.5, Kreutzer et al.). This natural mechanism has now become the focus for the development of a new class of pharmaceutical agents for treating disorders that are caused by the aberrant or unwanted regulation of a gene.

[0052] The iRNAs of the compositions described herein include an RNA strand (the antisense strand) having a region which is 30 nucleotides or less in length, i.e., 15-30 nucleotides in length, generally 19-24 nucleotides in length, which region is substantially complementary to at least part of an mRNA transcript of a CD274/PD-L1 gene. The use of these iRNAs enables the targeted degradation of mRNAs of genes that are implicated in pathologies associated with CD274/PD-L1 expression in mammals. Very low dosages of CD274/PD-L1 iRNAs in particular can specifically and efficiently mediate RNAi, resulting in significant inhibition of expression of a CD274/PD-L1 gene. Using cell-based assays, the present inventors have demonstrated that iRNAs targeting CD274/PD-L1 can specifically and efficiently mediate RNAi, resulting in significant inhibition of expression of a CD274/PD-L1 gene. Thus, methods and compositions including these iRNAs are useful for treating pathological processes that can be mediated by down regulating CD274/PD-L1, such as in the treatment of a cancer, hematological malignancy, or infectious disease, e.g., breast cancer or hepatitis B. The following detailed description discloses how to make and use compositions containing iRNAs to inhibit the expression of a CD274/PD-L1 gene, as well as compositions and methods for treating diseases and disorders caused by or modulated by the expression of this gene.

[0053] Embodiments of the pharmaceutical compositions featured in the invention include an iRNA having an antisense strand comprising a region which is 30 nucleotides or less in length, generally 19-24 nucleotides in length, which region is substantially complementary to at least part of an RNA transcript of a CD274/PD-L1 gene, together with a pharmaceutically acceptable carrier. Embodiments of compositions featured in the invention also include an iRNA having an antisense strand having a region of complementarity which is 30 nucleotides or less in length, generally 19-24 nucleotides in length, and is substantially complementary to at least part of an RNA transcript of a CD274/PD-L1 gene.

[0054] Accordingly, in some aspects, pharmaceutical compositions containing a CD274/PD-L1 iRNA and a pharmaceutically acceptable carrier, methods of using the compositions to inhibit expression of a CD274/PD-L1 gene, and methods of using the pharmaceutical compositions to treat diseases caused by expression of a CD274/PD-L1 gene are featured in the invention.

### I. Definitions

[0055] For convenience, the meaning of certain terms and phrases used in the specification, examples, and appended claims, are provided below. If there is an apparent discrepancy between the usage of a term in other parts of this specification and its definition provided in this section, the definition in this section shall prevail.

[0056] “G,” “C,” “A,” “T” and “U” each generally stand for a nucleotide that contains guanine, cytosine, adenine, thymidine and uracil as a base, respectively. However, it will be understood that the term “ribonucleotide” or “nucleotide” can also refer to a modified nucleotide, as further detailed below, or a surrogate replacement moiety. The skilled person is well aware that guanine, cytosine, adenine, and uracil can be replaced by other moieties without substantially altering the base pairing properties of an oligonucleotide comprising a nucleotide bearing such replacement moiety. For example, without limitation, a nucleotide comprising inosine as its base can base pair with nucleotides containing adenine, cytosine, or uracil. Hence, nucleotides containing uracil, guanine, or adenine can be replaced in the nucleotide sequences of dsRNA featured in the invention by a nucleotide containing, for example, inosine. In another example, adenine and cytosine anywhere in the oligonucleotide can be replaced with guanine and uracil, respectively to form G-U Wobble base pairing with the target mRNA. Sequences containing such replacement moieties are suitable for the compositions and methods featured in the invention.

[0057] As used herein, “Programmed Death Ligand-1” (“PD-L1”) or “cluster of differentiation 274” (“CD274”) refers to a particular polypeptide expressed in a cell. PD-L1 is also known as CD274, B7-H1, PDCD1L1, PDCD1LG1, and PDL1. The sequence of a human CD274/PD-L1 mRNA transcript can be found at NM_014143.2 (SEQ ID NO: 869). The sequence of mouse CD274/PD-L1 mRNA can be found at NM_021893 (SEQ ID NO: 870), and the sequence of rat CD274/PD-L1 mRNA can be found at XM_001079572.1 (SEQ ID NO: 871) or XM_574652.2; (SEQ ID NO: 872).

[0058] As used herein, the term “iRNA” refers to an agent that contains RNA as that term is defined herein, and which mediates the targeted cleavage of an RNA transcript via an RNA-induced silencing complex (RISC) pathway. In one embodiment, an iRNA as described herein effects inhibition of CD274/PD-L1 expression. Alternatively, in another embodiment, an iRNA as described herein activates CD274/PD-L1 expression.

[0059] As used herein, “target sequence” refers to a contiguous portion of the nucleotide sequence of an mRNA molecule formed during the transcription of a CD274/PD-L1 gene, including messenger RNA (mRNA) that is a product of RNA processing of a primary transcription product. The target portion of the sequence will be at least long enough to serve as a substrate for iRNA-directed cleavage at or near that portion. For example, the target sequence will generally be from 9-36 nucleotides in length, e.g., 15-30 nucleotides in length, including all sub-ranges therebetween. As non-limiting examples, the target sequence can be from 15-30 nucleotides, 15-26 nucleotides, 15-23 nucleotides, 15-22 nucleotides, 15-21 nucleotides, 15-20 nucleotides, 15-19 nucleotides, 15-18 nucleotides, 15-17 nucleotides, 18-30 nucleotides, 18-26 nucleotides, 18-23 nucleotides, 18-22 nucleotides, 18-21 nucleotides, 18-20 nucleotides, 19-30 nucleotides, 19-26 nucleotides, 19-23 nucleotides, 19-22 nucleotides, 19-21 nucleotides, 19-20 nucleotides, 20-30 nucleotides, 20-26 nucleotides, 20-25 nucleotides, 20-24 nucleotides,20-23 nucleotides, 20-22 nucleotides, 20-21 nucleotides, 21-30 nucleotides, 21-26 nucleotides, 21-25 nucleotides, 21-24 nucleotides, 21-23 nucleotides, or 21-22 nucleotides.

[0060] As used herein, the term “strand comprising a sequence” refers to an oligonucleotide comprising a chain of nucleotides that is described by the sequence referred to using the standard nucleotide nomenclature.

[0061] As used herein, and unless otherwise indicated, the term “complementary,” when used to describe a first nucleotide sequence in relation to a second nucleotide sequence, refers to the ability of an oligonucleotide or polynucleotide comprising the first nucleotide sequence to hybridize and form a duplex structure under certain conditions with an oligonucleotide or polynucleotide comprising the second nucleotide sequence, as will be understood by the skilled person. Such conditions can, for example, be stringent conditions, where stringent conditions may include: 400 mM NaCl, 40 mM PIPES pH 6.4, 1 mM EDTA, 50° C. or 70° C. for 12-16 hours followed by washing. Other conditions, such as physiologically relevant conditions as can be encountered inside an organism, can apply. The skilled person will be able to determine the set of conditions most appropriate for a test of complementarity of two sequences in accordance with the ultimate application of the hybridized nucleotides.

[0062] Complementary sequences within an iRNA, e.g., within a dsRNA as described herein, include base-pairing of the oligonucleotide or polynucleotide comprising a first nucleotide sequence to an oligonucleotide or polynucleotide comprising a second nucleotide sequence over the entire length of one or both nucleotide sequences. Such sequences can be referred to as “fully complementary” with respect to each other herein. However, where a first sequence is referred to as “substantially complementary” with respect to a second sequence herein, the two sequences can be fully complementary, or they can form one or more, but generally not more than 5, 4, 3 or 2 mismatched base pairs upon hybridization for a duplex up to 30 base pairs (bp), while retaining the ability to hybridize under the conditions most relevant to their ultimate application, e.g., inhibition of gene expression via a RISC pathway. However, where two oligonucleotides are designed to form, upon hybridization, one or more single stranded overhangs, such overhangs shall not be regarded as mismatches with regard to the determination of complementarity. For example, a dsRNA comprising one oligonucleotide 21 nucleotides in length and another oligonucleotide 23 nucleotides in length, wherein the longer oligonucleotide comprises a sequence of 21 nucleotides that is fully complementary to the shorter oligonucleotide, can yet be referred to as “fully complementary” for the purposes described herein.

[0063] “Complementary” sequences, as used herein, can also include, or be formed entirely from, non-Watson-Crick base pairs and/or base pairs formed from non-natural and modified nucleotides, in as far as the above requirements with respect to their ability to hybridize are fulfilled. Such non-Watson-Crick base pairs includes, but are not limited to, G:U Wobble or Hoogstein base pairing.

[0064] The terms “complementary,” “fully complementary” and “substantially complementary” herein can be used with respect to the base matching between the sense strand and the antisense strand of a dsRNA, or between the antisense strand of an iRNA agent and a target sequence, as will be understood from the context of their use.

[0065] As used herein, a polynucleotide that is “substantially complementary to at least part of” a messenger RNA (an mRNA) refers to a polynucleotide that is substantially complementary to a contiguous portion of the mRNA of interest (e.g., an mRNA encoding CD274/PD-L1). For example, a polynucleotide is complementary to at least a part of a CD274/PD-L1mRNA if the sequence is substantially complementary to a non-interrupted portion of an mRNA encoding CD274/PD-L1.

[0066] The term “double-stranded RNA” or “dsRNA,” as used herein, refers to an iRNA that includes an RNA molecule or complex of molecules having a hybridized duplex region that comprises two anti-parallel and substantially complementary nucleic acid strands, which will be referred to as having “sense” and “antisense” orientations with respect to a target RNA. The duplex region can be of any length that permits specific degradation of a desired target RNA through a RISC pathway, but will typically range from 9 to 36 base pairs in length, e.g., 15-30 base pairs in length. Considering a duplex between 9 and 36 base pairs, the duplex can be any length in this range, for example, 9, 10, 11, 12, 13, 14, 15, 16, 17, 18, 19, 20, 21, 22, 23, 24, 25, 26, 27, 28, 29, 30, 31, 32, 33, 34, 35, or 36 and any sub-range therein between, including, but not limited to 15-30 base pairs, 15-26 base pairs, 15-23 base pairs, 15-22 base pairs, 15-21 base pairs, 15-20 base pairs, 15-19 base pairs, 15-18 base pairs, 15-17 base pairs, 18-30 base pairs, 18-26 base pairs, 18-23 base pairs, 18-22 base pairs, 18-21 base pairs, 18-20 base pairs, 19-30 base pairs, 19-26 base pairs, 19-23 base pairs, 19-22 base pairs, 19-21 base pairs, 19-20 base pairs, 20-30 base pairs, 20-26 base pairs, 20-25 base pairs, 20-24 base pairs, 20-23 base pairs, 20-22 base pairs, 20-21 base pairs, 21-30 base pairs, 21-26 base pairs, 21-25 base pairs, 21-24 base pairs, 21-23 base pairs, or 21-22 base pairs. dsRNAs generated in the cell by processing with Dicer and similar enzymes are generally in the range of 19-22 base pairs in length. One strand of the duplex region of a dsDNA comprises a sequence that is substantially complementary to a region of a target RNA. The two strands forming the duplex structure can be from a single RNA molecule having at least one self-complementary region, or can be formed from two or more separate RNA molecules. Where the duplex region is formed from two strands of a single molecule, the molecule can have a duplex region separated by a single stranded chain of nucleotides (herein referred to as a “hairpin loop”) between the 3′-end of one strand and the 5′-end of the respective other strand forming the duplex structure. The hairpin loop can comprise at least one unpaired nucleotide; in some embodiments the hairpin loop can comprise at least 3, at least 4, at least 5, at least 6, at least 7, at least 8, at least 9, at least 10, at least 20, at least 23 or more unpaired nucleotides. Where the two substantially complementary strands of a dsRNA are comprised by separate RNA molecules, those molecules need not, but can be covalently connected. Where the two strands are connected covalently by means other than a hairpin loop, the connecting structure is referred to as a “linker.” The term “siRNA” is also used herein to refer to a dsRNA as described above.

[0067] The skilled artisan will recognize that the term “RNA molecule” or “ribonucleic acid molecule” encompasses not only RNA molecules as expressed or found in nature, but also analogs and derivatives of RNA comprising one or more ribonucleotide/ribonucleoside analogs or derivatives as described herein or as known in the art. Strictly speaking, a “ribonucleoside” includes a nucleoside base and a ribose sugar, and a “ribonucleotide” is a ribonucleoside with one, two or three phosphate moieties. However, the terms “ribonucleoside” and “ribonucleotide” can be considered to be equivalent as used herein. The RNA can be modified in the nucleobase structure or in the ribose-phosphate backbone structure, e.g., as described herein below. However, the molecules comprising ribonucleoside analogs or derivatives must retain the ability to form a duplex. As non-limiting examples, an RNA molecule can also include at least one modified ribonucleoside including but not limited to a 2′-O-methyl modified nucleoside, a nucleoside comprising a 5′ phosphorothioate group, a terminal nucleoside linked to a cholesteryl derivative or dodecanoic acid bisdecylamide group, a locked nucleoside, an abasic nucleoside, a 2′-deoxy-2′-fluoro modified nucleoside, a 2′-amino-modified nucleoside, 2′-alkyl-modified nucleoside, morpholino nucleoside, a phosphoramidate or a non-natural base comprising nucleoside, or any combination thereof. Alternatively, an RNA molecule can comprise at least two modified ribonucleosides, at least 3, at least 4, at least 5, at least 6, at least 7, at least 8, at least 9, at least 10, at least 15, at least 20 or more, up to the entire length of the dsRNA molecule. The modifications need not be the same for each of such a plurality of modified ribonucleosides in an RNA molecule. In one embodiment, modified RNAs contemplated for use in methods and compositions described herein are peptide nucleic acids (PNAs) that have the ability to form the required duplex structure and that permit or mediate the specific degradation of a target RNA via a RISC pathway.

[0068] In one aspect, a modified ribonucleoside includes a deoxyribonucleoside. In such an instance, an iRNA agent can comprise one or more deoxynucleosides, including, for example, a deoxynucleoside overhang(s), or one or more deoxynucleosides within the double stranded portion of a dsRNA. However, it is self evident that under no circumstances is a double stranded DNA molecule encompassed by the term “iRNA.”

[0069] In one aspect, an RNA interference agent includes a single stranded RNA that interacts with a target RNA sequence to direct the cleavage of the target RNA. Without wishing to be bound by theory, long double stranded RNA introduced into plants and invertebrate cells is broken down into siRNA by a Type III endonuclease known as Dicer (Sharp et al., Genes Dev. 2001, 15:485). Dicer, a ribonuclease-III-like enzyme, processes the dsRNA into 19-23 base pair short interfering RNAs with characteristic two base 3′ overhangs (Bernstein, et al., (2001) Nature 409:363). The siRNAs are then incorporated into an RNA-induced silencing complex (RISC) where one or more helicases unwind the siRNA duplex, enabling the complementary antisense strand to guide target recognition (Nykanen, et al., (2001) Cell 107:309). Upon binding to the appropriate target mRNA, one or more endonucleases within the RISC cleaves the target to induce silencing (Elbashir, et al., (2001) Genes Dev. 15:188). Thus, in one aspect the invention relates to a single stranded RNA that promotes the formation of a RISC complex to effect silencing of the target gene.

[0070] As used herein, the term “nucleotide overhang” refers to at least one unpaired nucleotide that protrudes from the duplex structure of an iRNA, e.g., a dsRNA. For example, when a 3′-end of one strand of a dsRNA extends beyond the 5′-end of the other strand, or vice versa, there is a nucleotide overhang. A dsRNA can comprise an overhang of at least one nucleotide; alternatively the overhang can comprise at least two nucleotides, at least three nucleotides, at least four nucleotides, at least five nucleotides or more. A nucleotide overhang can comprise or consist of a nucleotide/nucleoside analog, including a deoxynucleotide/nucleoside. The overhang(s) may be on the sense strand, the antisense strand or any combination thereof. Furthermore, the nucleotide(s) of an overhang can be present on the 5′ end, 3′ end or both ends of either an antisense or sense strand of a dsRNA.

[0071] In one embodiment, the antisense strand of a dsRNA has a 1-10 nucleotide overhang at the 3′ end and/or the 5′ end. In one embodiment, the sense strand of a dsRNA has a 1-10 nucleotide overhang at the 3′ end and/or the 5′ end. In another embodiment, one or more of the nucleotides in the overhang is replaced with a nucleoside thiophosphate.

[0072] The terms “blunt” or “blunt ended” as used herein in reference to a dsRNA mean that there are no unpaired nucleotides or nucleotide analogs at a given terminal end of a dsRNA, i.e., no nucleotide overhang. One or both ends of a dsRNA can be blunt. Where both ends of a dsRNA are blunt, the dsRNA is said to be blunt ended. To be clear, a “blunt ended” dsRNA is a dsRNA that is blunt at both ends, i.e., no nucleotide overhang at either end of the molecule. Most often such a molecule will be double-stranded over its entire length.

[0073] The term “antisense strand” or “guide strand” refers to the strand of an iRNA, e.g., a dsRNA, which includes a region that is substantially complementary to a target sequence. As used herein, the term “region of complementarity” refers to the region on the antisense strand that is substantially complementary to a sequence, for example a target sequence, as defined herein. Where the region of complementarity is not fully complementary to the target sequence, the mismatches may be in the internal or terminal regions of the molecule. Generally, the most tolerated mismatches are in the terminal regions, e.g., within 5, 4, 3, or 2 nucleotides of the 5′ and/or 3′ terminus.

[0074] The term “sense strand,” or “passenger strand” as used herein, refers to the strand of an iRNA that includes a region that is substantially complementary to a region of the antisense strand as that term is defined herein.

[0075] As used herein, in one embodiment, the term “SNALP” refers to a stable nucleic acid-lipid particle. A SNALP represents a vesicle of lipids coating a reduced aqueous interior comprising a nucleic acid such as an iRNA or a plasmid from which an iRNA is transcribed. SNALPs are described, e.g., in U.S. Patent Application Publication Nos. 20060240093, 20070135372, and in International Application No. WO 2009082817. These applications are incorporated herein by reference in their entirety. Examples of “SNALP” formulations are described elsewhere herein.

[0076] “Introducing into a cell,” when referring to an iRNA, means facilitating or effecting uptake or absorption into the cell, as is understood by those skilled in the art. Absorption or uptake of an iRNA can occur through unaided diffusive or active cellular processes, or by auxiliary agents or devices. The meaning of this term is not limited to cells in vitro; an iRNA can also be “introduced into a cell,” wherein the cell is part of a living organism. In such an instance, introduction into the cell will include the delivery to the organism. For example, for in vivo delivery, iRNA can be injected into a tissue site or administered systemically. In vivo delivery can also be by a beta-glucan delivery system, such as those described in U.S. Pat. Nos. 5,032,401 and 5,607,677, and U.S. Publication No. 2005/0281781, which are hereby incorporated by reference in their entirety. In vitro introduction into a cell includes methods known in the art such as electroporation and lipofection. Further approaches are described herein below or are known in the art.

[0077] As used herein, the term “modulate the expression of,” refers to at an least partial “inhibition” or partial “activation” of CD274/PD-L1 gene expression in a cell treated with an iRNA composition as described herein compared to the expression of CD274/PD-L1 in an untreated cell.

[0078] The terms “activate,” “enhance,” “up-regulate the expression of,” “increase the expression of,” and the like, in so far as they refer to a CD274/PD-L1 gene, herein refer to the at least partial activation of the expression of a CD274/PD-L1 gene, as manifested by an increase in the amount of CD274/PD-L1 mRNA, which may be isolated from or detected in a first cell or group of cells in which a CD274/PD-L1 gene is transcribed and which has or have been treated such that the expression of a CD274/PD-L1 gene is increased, as compared to a second cell or group of cells substantially identical to the first cell or group of cells but which has or have not been so treated (control cells).

[0079] In one embodiment, expression of a CD274/PD-L1 gene is activated by at least about 10%, 15%, 20%, 25%, 30%, 35%, 40%, 45%, or 50% by administration of an iRNA as described herein. In some embodiments, a CD274/PD-L1 gene is activated by at least about 60%, 70%, or 80% by administration of an iRNA featured in the invention. In some embodiments, expression of a CD274/PD-L1 gene is activated by at least about 85%, 90%, or 95% or more by administration of an iRNA as described herein. In some embodiments, the CD274/PD-L1 gene expression is increased by at least 1-fold, at least 2-fold, at least 5-fold, at least 10-fold, at least 50-fold, at least 100-fold, at least 500-fold, at least 1000 fold or more in cells treated with an iRNA as described herein compared to the expression in an untreated cell. Activation of expression by small dsRNAs is described, for example, in Li et al., 2006 Proc. Natl. Acad. Sci. U.S.A. 103:17337-42, and in US20070111963 and US2005226848, each of which is incorporated herein by reference.

[0080] The terms “silence,” “inhibit the expression of,” “down-regulate the expression of,” “suppress the expression of,” and the like, in so far as they refer to a CD274/PD-L1 gene, herein refer to the at least partial suppression of the expression of a CD274/PD-L1 gene, as manifested by a reduction of the amount of CD274/PD-L1 mRNA which may be isolated from or detected in a first cell or group of cells in which a CD274/PD-L1 gene is transcribed and which has or have been treated such that the expression of a CD274/PD-L1 gene is inhibited, as compared to a second cell or group of cells substantially identical to the first cell or group of cells but which has or have not been so treated (control cells). The degree of inhibition is usually expressed in terms of

$$\frac{( mRNA in control cells ) - ( mRNA in treated cells )}{( mRNA in control cells )} \cdot 100 \%$$

[0081] Alternatively, the degree of inhibition may be given in terms of a reduction of a parameter that is functionally linked to CD274/PD-L1 gene expression, e.g., the amount of protein encoded by a CD274/PD-L1 gene, or the number of cells displaying a certain phenotype, e.g., lack of or decreased cytokine production. In principle, CD274/PD-L1 gene silencing may be determined in any cell expressing CD274/PD-L1, either constitutively or by genomic engineering, and by any appropriate assay. However, when a reference is needed in order to determine whether a given iRNA inhibits the expression of the CD274/PD-L1 gene by a certain degree and therefore is encompassed by the instant invention, the assays provided in the Examples below shall serve as such reference.

[0082] For example, in certain instances, expression of a CD274/PD-L1 gene is suppressed by at least about 10%, 15%, 20%, 25%, 30%, 35%, 40%, 45%, or 50% by administration of an iRNA featured in the invention. In some embodiments, a CD274/PD-L1 gene is suppressed by at least about 60%, 70%, or 80% by administration of an iRNA described herein. In some embodiments, a CD274/PD-L1 gene is suppressed by at least about 85%, 90%, 95%, 98%, 99%, or more by administration of an iRNA as described herein.

[0083] As used herein in the context of CD274/PD-L1 expression, the terms “treat,” “treatment,” and the like, refer to relief from or alleviation of pathological processes mediated by CD274/PD-L1 expression. In the context of the present invention insofar as it relates to any of the other conditions recited herein below (other than pathological processes mediated by CD274/PD-L1 expression), the terms “treat,” “treatment,” and the like mean to relieve or alleviate at least one symptom associated with such condition, or to slow or reverse the progression or anticipated progression of such condition, such as slowing the progression of a malignancy or cancer, or increasing the clearance of an infectious organism to alleviate/reduce the symptoms caused by the infection, e.g., hepatitis caused by infection with a hepatitis virus.

[0084] By “lower” in the context of a disease marker or symptom is meant a statistically significant decrease in such level. The decrease can be, for example, at least 10%, at least 20%, at least 30%, at least 40% or more, and is preferably down to a level accepted as within the range of normal for an individual without such disorder.

[0085] As used herein, the phrases “therapeutically effective amount” and “prophylactically effective amount” refer to an amount that provides a therapeutic benefit in the treatment, prevention, or management of pathological processes mediated by CD274/PD-L1 expression or an overt symptom of pathological processes mediated by CD274/PD-L1 expression. The specific amount that is therapeutically effective can be readily determined by an ordinary medical practitioner, and can vary depending on factors known in the art, such as, for example, the type of pathological processes mediated by CD274/PD-L1 expression, the patient's history and age, the stage of pathological processes mediated by CD274/PD-L1 expression, and the administration of other agents that inhibit pathological processes mediated by CD274/PD-L1 expression.

[0086] As used herein, a “pharmaceutical composition” comprises a pharmacologically effective amount of an iRNA and a pharmaceutically acceptable carrier. As used herein, “pharmacologically effective amount,” “therapeutically effective amount” or simply “effective amount” refers to that amount of an iRNA effective to produce the intended pharmacological, therapeutic or preventive result. For example, if a given clinical treatment is considered effective when there is at least a 10% reduction in a measurable parameter associated with a disease or disorder, a therapeutically effective amount of a drug for the treatment of that disease or disorder is the amount necessary to effect at least a 10% reduction in that parameter. For example, a therapeutically effective amount of an iRNA targeting CD274/PD-L1 can reduce CD274/PD-L1 protein levels by at least 10%.

[0087] The term “pharmaceutically acceptable carrier” refers to a carrier for administration of a therapeutic agent. Such carriers include, but are not limited to, saline, buffered saline, dextrose, water, glycerol, ethanol, and combinations thereof. The term specifically excludes cell culture medium. For drugs administered orally, pharmaceutically acceptable carriers include, but are not limited to pharmaceutically acceptable excipients such as inert diluents, disintegrating agents, binding agents, lubricating agents, sweetening agents, flavoring agents, coloring agents and preservatives. Suitable inert diluents include sodium and calcium carbonate, sodium and calcium phosphate, and lactose, while corn starch and alginic acid are suitable disintegrating agents. Binding agents may include starch and gelatin, while the lubricating agent, if present, will generally be magnesium stearate, stearic acid or talc. If desired, the tablets may be coated with a material such as glyceryl monostearate or glyceryl distearate, to delay absorption in the gastrointestinal tract. Agents included in drug formulations are described further herein below.

[0088] As used herein, a “subject” is a mammal, e. g. a dog, horse, cat, and other non-human primates. In a preferred embodiment, a subject is a human.

[0089] As used herein, the term “LNPXX”, wherein the “XX” are numerals, is also referred to as “AFXX” herein. For example, LNPO9 is also referred to AF09 and LNP12 is also known as or referred to as AF12.

[0090] As used herein, the term “comprising” or “comprises” is used in reference to compositions, methods, and respective component(s) thereof, that are essential to the invention, yet open to the inclusion of unspecified elements, whether essential or not.

[0091] As used herein, the term “consisting essentially of” refers to those elements required for a given embodiment. The term permits the presence of elements that do not materially affect the basic and novel or functional characteristic(s) of that embodiment of the invention.

[0092] The term “consisting of” refers to compositions, methods, and respective components thereof as described herein, which are exclusive of any element not recited in that description of the embodiment.

### II. Double-Stranded Ribonucleic Acid (dsRNA)

[0093] Described herein are iRNA agents that inhibit the expression of the CD274/PD-L1 gene. In one embodiment, the iRNA agent includes double-stranded ribonucleic acid (dsRNA) molecules for inhibiting the expression of a CD274/PD-Llgene in a cell or mammal, e.g., in a human having a cancer or infectious disease, where the dsRNA includes an antisense strand having a region of complementarity which is complementary to at least a part of an mRNA formed in the expression of a CD274/PD-L1 gene, and where the region of complementarity is 30 nucleotides or less in length, generally 19-24 nucleotides in length, and where the dsRNA, upon contact with a cell expressing the CD274/PD-L1 gene, inhibits the expression of the CD274/PD-L1 gene by at least 10% as assayed by, for example, a PCR or branched DNA (bDNA)-based method, or by a protein-based method, such as by Western blot. In one embodiment, the iRNA agent activates the expression of a CD274/PD-L1 gene in a cell or mammal. Expression of a CD274/PD-L1 gene in cell culture, such as in COS cells, HeLa cells, primary hepatocytes, HepG2 cells, primary cultured cells or in a biological sample from a subject can be assayed by measuring CD274/PD-L1 mRNA levels, such as by bDNA or TaqMan assay, or by measuring protein levels, such as by immunofluorescence analysis, using, for example, Western blotting or flow cytometric techniques.

[0094] A dsRNA includes two RNA strands that are sufficiently complementary to hybridize to form a duplex structure under conditions in which the dsRNA will be used. One strand of a dsRNA (the antisense strand) includes a region of complementarity that is substantially complementary, and generally fully complementary, to a target sequence. The target sequence can be derived from the sequence of an mRNA formed during the expression of a CD274/PD-L1 gene. The other strand (the sense strand) includes a region that is complementary to the antisense strand, such that the two strands hybridize and form a duplex structure when combined under suitable conditions. Generally, the duplex structure is between 15 and 30 inclusive, more generally between 18 and 25 inclusive, yet more generally between 19 and 24 inclusive, and most generally between 19 and 21 base pairs in length, inclusive. Similarly, the region of complementarity to the target sequence is between 15 and 30 inclusive, more generally between 18 and 25 inclusive, yet more generally between 19 and 24 inclusive, and most generally between 19 and 21 nucleotides in length, inclusive. In some embodiments, the dsRNA is between 15 and 20 nucleotides in length, inclusive, and in other embodiments, the dsRNA is between 25 and 30 nucleotides in length, inclusive. As the ordinarily skilled person will recognize, the targeted region of an RNA targeted for cleavage will most often be part of a larger RNA molecule, often an mRNA molecule. Where relevant, a “part” of an mRNA target is a contiguous sequence of an mRNA target of sufficient length to be a substrate for RNAi-directed cleavage (i.e., cleavage through a RISC pathway). dsRNAs having duplexes as short as 9 base pairs can, under some circumstances, mediate RNAi-directed RNA cleavage. Most often a target will be at least 15 nucleotides in length, preferably 15-30 nucleotides in length.

[0095] One of skill in the art will also recognize that the duplex region is a primary functional portion of a dsRNA, e.g., a duplex region of 9 to 36, e.g., 15-30 base pairs. Thus, in one embodiment, to the extent that it becomes processed to a functional duplex of e.g., 15-30 base pairs that targets a desired RNA for cleavage, an RNA molecule or complex of RNA molecules having a duplex region greater than 30 base pairs is a dsRNA. Thus, an ordinarily skilled artisan will recognize that in one embodiment, then, an miRNA is a dsRNA. In another embodiment, a dsRNA is not a naturally occurring miRNA. In another embodiment, an iRNA agent useful to target CD274/PD-L1 expression is not generated in the target cell by cleavage of a larger dsRNA.

[0096] A dsRNA as described herein can further include one or more single-stranded nucleotide overhangs. The dsRNA can be synthesized by standard methods known in the art as further discussed below, e.g., by use of an automated DNA synthesizer, such as are commercially available from, for example, Biosearch, Applied Biosystems, Inc. In one embodiment, a CD274/PD-L1 gene is a human CD274/PD-L1 gene. In another embodiment the CD274/PD-L1 gene is a mouse or a rat CD274/PD-L1 gene. In specific embodiments, the first sequence is a sense strand of a dsRNA that includes a sense sequence from Table 2 (SEQ ID NO: 5-SEQ ID NO: 436), Table 3 (SEQ ID NO: 437-SEQ ID NO: 868), and Table 5 (SEQ ID NO: 877-SEQ ID NO: 924), and the second sequence is selected from the group consisting of the corresponding antisense sequences of Table 2 (SEQ ID NO: 5-SEQ ID NO: 436), Table 3 (SEQ ID NO: 437-SEQ ID NO: 868), and Table 5 (SEQ ID NO: 877-SEQ ID NO: 924). Alternative dsRNA agents that target elsewhere in the target sequence provided in Table 2, Table 3, and Table 5 can readily be determined using the target sequence and the flanking CD274/PD-L1 sequence.

[0097] In one aspect, a dsRNA will include at least nucleotide sequences, whereby the sense strand is selected from the groups of sense sequences provided in Table 2, Table 3, and Table 5, and the corresponding antisense strand of the sense strand selected from Table 2, Table 3, and Table 5. In this aspect, one of the two sequences is complementary to the other of the two sequences, with one of the sequences being substantially complementary to a sequence of an mRNA generated in the expression of a CD274/PD-L1 gene. As such, in this aspect, a dsRNA will include two oligonucleotides, where one oligonucleotide is described as the sense strand in Table 2, Table 3, and Table 5, and the second oligonucleotide is described as the corresponding antisense strand of the sense strand from Table 2, Table 3, and Table 5. As described elsewhere herein and as known in the art, the complementary sequences of a dsRNA can also be contained as self-complementary regions of a single nucleic acid molecule, as opposed to being on separate oligonucleotides.

[0098] The skilled person is well aware that dsRNAs having a duplex structure of between 20 and 23, but specifically 21, base pairs have been hailed as particularly effective in inducing RNA interference (Elbashir et al., EMBO 2001, 20:6877-6888). However, others have found that shorter or longer RNA duplex structures can be effective as well. In the embodiments described above, by virtue of the nature of the oligonucleotide sequences provided in Table 2, Table 3, and Table 5, dsRNAs described herein can include at least one strand of a length of minimally 21 nt. It can be reasonably expected that shorter duplexes having one of the sequences of Table 2, Table 3, and Table 5, minus only a few nucleotides on one or both ends may be similarly effective as compared to the dsRNAs described above. Hence, dsRNAs having a partial sequence of at least 15, 16, 17, 18, 19, 20, or more contiguous nucleotides from one of the sequences of Table 2, Table 3, and Table 5, and differing in their ability to inhibit the expression of a CD274/PD-L1 gene by not more than 5, 10, 15, 20, 25, or 30% inhibition from a dsRNA comprising the full sequence, are contemplated according to the invention.

[0099] In addition, the RNAs provided in Table 2, Table 3, and Table 5 identify a site in a CD274/PD-L1 transcript that is susceptible to RISC-mediated cleavage. As such, the present invention further features iRNAs that target within one of such sequences. As used herein, an iRNA is said to target within a particular site of an RNA transcript if the iRNA promotes cleavage of the transcript anywhere within that particular site. Such an iRNA will generally include at least 15 contiguous nucleotides from one of the sequences provided in Table 2, Table 3, and Table 5, coupled to additional nucleotide sequences taken from the region contiguous to the selected sequence in a CD274/PD-L1 gene.

[0100] While a target sequence is generally 15-30 nucleotides in length, there is wide variation in the suitability of particular sequences in this range for directing cleavage of any given target RNA. Various software packages and the guidelines set out herein provide guidance for the identification of optimal target sequences for any given gene target, but an empirical approach can also be taken in which a “window” or “mask” of a given size (as a non-limiting example, 21 nucleotides) is literally or figuratively (including, e.g., in silico) placed on the target RNA sequence to identify sequences in the size range that may serve as target sequences. By moving the sequence “window” progressively one nucleotide upstream or downstream of an initial target sequence location, the next potential target sequence can be identified, until the complete set of possible sequences is identified for any given target size selected. This process, coupled with systematic synthesis and testing of the identified sequences (using assays as described herein or as known in the art) to identify those sequences that perform optimally can identify those RNA sequences that, when targeted with an iRNA agent, mediate the best inhibition of target gene expression. Thus, while the sequences identified, for example, in Table 2, Table 3, and Table 5 represent effective target sequences, it is contemplated that further optimization of inhibition efficiency can be achieved by progressively “walking the window” one nucleotide upstream or downstream of the given sequences to identify sequences with equal or better inhibition characteristics.

[0101] Further, it is contemplated that for any sequence identified, e.g., i Table 2, Table 3, and Table 5, further optimization could be achieved by systematically either adding or removing nucleotides to generate longer or shorter sequences and testing those and sequences generated by walking a window of the longer or shorter size up or down the target RNA from that point. Again, coupling this approach to generating new candidate targets with testing for effectiveness of iRNAs based on those target sequences in an inhibition assay as known in the art or as described herein can lead to further improvements in the efficiency of inhibition. Further still, such optimized sequences can be adjusted by, e.g., the introduction of modified nucleotides as described herein or as known in the art, addition or changes in overhang, or other modifications as known in the art and/or discussed herein to further optimize the molecule (e.g., increasing serum stability or circulating half-life, increasing thermal stability, enhancing transmembrane delivery, targeting to a particular location or cell type, increasing interaction with silencing pathway enzymes, increasing release from endosomes, etc.) as an expression inhibitor.

[0102] An iRNA as described herein can contain one or more mismatches to the target sequence. In one embodiment, an iRNA as described herein contains no more than 3 mismatches. If the antisense strand of the iRNA contains mismatches to a target sequence, it is preferable that the area of mismatch not be located in the center of the region of complementarity. If the antisense strand of the iRNA contains mismatches to the target sequence, it is preferable that the mismatch be restricted to be within the last 5 nucleotides from either the 5′ or 3′ end of the region of complementarity. For example, for a 23 nucleotide iRNA agent RNA strand which is complementary to a region of a CD274/PD-L1 gene, the RNA strand generally does not contain any mismatch within the central 13 nucleotides. The methods described herein or methods known in the art can be used to determine whether an iRNA containing a mismatch to a target sequence is effective in inhibiting the expression of a CD274/PD-L1 gene. Consideration of the efficacy of iRNAs with mismatches in inhibiting expression of a CD274/PD-L1 gene is important, especially if the particular region of complementarity in a CD274/PD-L1 gene is known to have polymorphic sequence variation within the population.

[0103] In one embodiment, at least one end of a dsRNA has a single-stranded nucleotide overhang of 1 to 4, generally 1 or 2 nucleotides. dsRNAs having at least one nucleotide overhang have unexpectedly superior inhibitory properties relative to their blunt-ended counterparts. In yet another embodiment, the RNA of an iRNA, e.g., a dsRNA, is chemically modified to enhance stability or other beneficial characteristics. The nucleic acids featured in the invention may be synthesized and/or modified by methods well established in the art, such as those described in “Current protocols in nucleic acid chemistry,” Beaucage, S. L. et al. (Edrs.), John Wiley & Sons, Inc., New York, NY, USA, which is hereby incorporated herein by reference. Modifications include, for example, (a) end modifications, e.g., 5′ end modifications (phosphorylation, conjugation, inverted linkages, etc.) 3′ end modifications (conjugation, DNA nucleotides, inverted linkages, etc.), (b) base modifications, e.g., replacement with stabilizing bases, destabilizing bases, or bases that base pair with an expanded repertoire of partners, removal of bases (abasic nucleotides), or conjugated bases, (c) sugar modifications (e.g., at the 2′ position or 4′ position) or replacement of the sugar, as well as (d) a modifications, including modification or replacement of the phosphodiester linkages. Specific examples of RNA compounds useful in the embodiments described herein include, but are not limited to RNAs containing modified backbones or no natural internucleoside linkages. RNAs having modified backbones include, among others, those that do not have a phosphorus atom in the backbone. For the purposes of this specification, and as sometimes referenced in the art, modified RNAs that do not have a phosphorus atom in their internucleoside backbone can also be considered to be oligonucleosides. In particular embodiments, the modified RNA will have a phosphorus atom in its internucleoside backbone.

[0104] Modified RNA backbones can include, for example, phosphorothioates, chiral phosphorothioates, phosphorodithioates, phosphotriesters, aminoalkylphosphotriesters, methyl and other alkyl phosphonates including 3′-alkylene phosphonates and chiral phosphonates, phosphinates, phosphoramidates including 3′-amino phosphoramidate and aminoalkylphosphoramidates, thionophosphoramidates, thionoalkylphosphonates, thionoalkylphosphotriesters, and boranophosphates having normal 3′-5′ linkages, 2′-5′ linked analogs of these, and those) having inverted polarity wherein the adjacent pairs of nucleoside units are linked 3′-5′ to 5′-3′ or 2′-5′ to 5′-2′. Various salts, mixed salts and free acid forms are also included.

[0105] Representative U.S. patents that teach the preparation of the above phosphorus-containing linkages include, but are not limited to, U.S. Pat. Nos. 3,687,808; 4,469,863; 4,476,301; 5,023,243; 5,177,195; 5,188,897; 5,264,423; 5,276,019; 5,278,302; 5,286,717; 5,321,131; 5,399,676; 5,405,939; 5,453,496; 5,455,233; 5,466,677; 5,476,925; 5,519,126; 5,536,821; 5,541,316; 5,550,111; 5,563,253; 5,571,799; 5,587,361; 5,625,050; 6,028,188; 6,124,445; 6,160,109; 6,169,170; 6,172,209; 6,239,265; 6,277,603; 6,326,199; 6,346,614; 6,444,423; 6,531,590; 6,534,639; 6,608,035; 6,683,167; 6,858,715; 6,867,294; 6,878,805; 7,015,315; 7,041,816; 7,273,933; 7,321,029; and U.S. Pat. RE39464, each of which is herein incorporated by reference

[0106] Modified RNA backbones that do not include a phosphorus atom therein have backbones that are formed by short chain alkyl or cycloalkyl internucleoside linkages, mixed heteroatoms and alkyl or cycloalkyl internucleoside linkages, or one or more short chain heteroatomic or heterocyclic internucleoside linkages. These include those having morpholino linkages (formed in part from the sugar portion of a nucleoside); siloxane backbones; sulfide, sulfoxide and sulfone backbones; formacetyl and thioformacetyl backbones; methylene formacetyl and thioformacetyl backbones; alkene containing backbones; sulfamate backbones; methyleneimino and methylenehydrazino backbones; sulfonate and sulfonamide backbones; amide backbones; and others having mixed N, O, S and CH2 component parts.

[0107] Representative U.S. patents that teach the preparation of the above oligonucleosides include, but are not limited to, U.S. Pat. Nos. 5,034,506; 5,166,315; 5,185,444; 5,214,134; 5,216,141; 5,235,033; 5,64,562; 5,264,564; 5,405,938; 5,434,257; 5,466,677; 5,470,967; 5,489,677; 5,541,307; 5,561,225; 5,596,086; 5,602,240; 5,608,046; 5,610,289; 5,618,704; 5,623,070; 5,663,312; 5,633,360; 5,677,437; and, 5,677,439, each of which is herein incorporated by reference.

[0108] In other RNA mimetics suitable or contemplated for use in iRNAs, both the sugar and the internucleoside linkage, i.e., the backbone, of the nucleotide units are replaced with novel groups. The base units are maintained for hybridization with an appropriate nucleic acid target compound. One such oligomeric compound, an RNA mimetic that has been shown to have excellent hybridization properties, is referred to as a peptide nucleic acid (PNA). In PNA compounds, the sugar backbone of an RNA is replaced with an amide containing backbone, in particular an aminoethylglycine backbone. The nucleobases are retained and are bound directly or indirectly to aza nitrogen atoms of the amide portion of the backbone. Representative U.S. patents that teach the preparation of PNA compounds include, but are not limited to, U.S. Pat. Nos. 5,539,082; 5,714,331; and 5,719,262, each of which is herein incorporated by reference. Further teaching of PNA compounds can be found, for example, in Nielsen et al., Science, 1991, 254, 1497-1500.

[0109] Some embodiments featured in the invention include RNAs with phosphorothioate backbones and oligonucleosides with heteroatom backbones, and in particular —CH₂—NH—CH₂—, —CH₂—N(CH₃)—O—CH₂—[known as a methylene (methylimino) or MMI backbone], —CH₂—O—N(CH₃)—CH₂—, —CH₂—N(CH₃)—N(CH₃)—CH₂— and —N(CH₃)—CH₂—CH₂—[wherein the native phosphodiester backbone is represented as —O—P—O—CH₂—] of the above-referenced U.S. Pat. No. 5,489,677, and the amide backbones of the above-referenced U.S. Pat. No. 5,602,240. In some embodiments, the RNAs featured herein have morpholino backbone structures of the above-referenced U.S. Pat. No. 5,034,506.

[0110] Modified RNAs can also contain one or more substituted sugar moieties. The iRNAs, e.g., dsRNAs, featured herein can include one of the following at the 2′ position: OH; F; O-, S-, or N-alkyl; O-, S-, or N-alkenyl; O-, S- or N-alkynyl; or O-alkyl-O-alkyl, wherein the alkyl, alkenyl and alkynyl may be substituted or unsubstituted C₁ to C₁₀ alkyl or C₂ to C₁₀ alkenyl and alkynyl. Exemplary suitable modifications include O[(CH₂)ₙO]ₘCH₃, O(CH₂)·ₙOCH₃, O(CH₂)ₙNH₂, O(CH₂) ₙCH₃, O(CH₂)ₙONH₂, and O(CH₂)ₙON[(CH₂)ₙCH₃)]₂, where n and m are from 1 to about 10. In other embodiments, dsRNAs include one of the following at the 2′ position: C₁ to C₁₀ lower alkyl, substituted lower alkyl, alkaryl, aralkyl, O-alkaryl or O-aralkyl, SH, SCH₃, OCN, Cl, Br, CN, CF₃, OCF₃, SOCH₃, SO₂CH₃, ONO₂, NO₂, N₃, NH₂, heterocycloalkyl, heterocycloalkaryl, aminoalkylamino, polyalkylamino, substituted silyl, an RNA cleaving group, a reporter group, an intercalator, a group for improving the pharmacokinetic properties of an iRNA, or a group for improving the pharmacodynamic properties of an iRNA, and other substituents having similar properties. In some embodiments, the modification includes a 2′-methoxyethoxy (2′-O—CH₂CH₂OCH₃, also known as 2′-O-(2-methoxyethyl) or 2′-MOE) (Martin et al., Helv. Chim. Acta, 1995, 78:486-504) i.e., an alkoxy-alkoxy group. Another exemplary modification is 2′-dimethylaminooxyethoxy, i.e., a O(CH₂)₂ON(CH₃)₂ group, also known as 2′-DMAOE, as described in examples herein below, and 2′-dimethylaminoethoxyethoxy (also known in the art as 2′-O-dimethylaminoethoxyethyl or 2′-DMAEOE), i.e., 2′-O—CH₂—O—CH₂—N(CH₂)₂, also described in examples herein below.

[0111] Other modifications include 2′-methoxy (2′-OCH₃), 2′-aminopropoxy (2′-OCH₂CH₂CH₂NH₂) and 2′-fluoro (2′-F). Similar modifications can also be made at other positions on the RNA of an iRNA, particularly the 3′ position of the sugar on the 3′ terminal nucleotide or in 2′-5′ linked dsRNAs and the 5′ position of 5′ terminal nucleotide. iRNAs may also have sugar mimetics such as cyclobutyl moieties in place of the pentofuranosyl sugar. Representative U.S. patents that teach the preparation of such modified sugar structures include, but are not limited to, U.S. Pat. Nos. 4,981,957; 5,118,800; 5,319,080; 5,359,044; 5,393,878; 5,446,137; 5,466,786; 5,514,785; 5,519,134; 5,567,811; 5,576,427; 5,591,722; 5,597,909; 5,610,300; 5,627,053; 5,639,873; 5,646,265; 5,658,873; 5,670,633; and 5,700,920, certain of which are commonly owned with the instant application, and each of which is herein incorporated by reference.

[0112] An iRNA can also include nucleobase (often referred to in the art simply as “base”) modifications or substitutions. As used herein, “unmodified” or “natural” nucleobases include the purine bases adenine (A) and guanine (G), and the pyrimidine bases thymine (T), cytosine (C) and uracil (U). Modified nucleobases include other synthetic and natural nucleobases such as 5-methylcytosine (5-me-C), 5-hydroxymethyl cytosine, xanthine, hypoxanthine, 2-aminoadenine, 6-methyl and other alkyl derivatives of adenine and guanine, 2-propyl and other alkyl derivatives of adenine and guanine, 2-thiouracil, 2-thiothymine and 2-thiocytosine, 5-halouracil and cytosine, 5-propynyl uracil and cytosine, 6-azo uracil, cytosine and thymine, 5-uracil (pseudouracil), 4-thiouracil, 8-halo, 8-amino, 8-thiol, 8-thioalkyl, 8-hydroxyl anal other 8-substituted adenines and guanines, 5-halo, particularly 5-bromo, 5-trifluoromethyl and other 5-substituted uracils and cytosines, 7-methylguanine and 7-methyladenine, 8-azaguanine and 8-azaadenine, 7-deazaguanine and 7-daazaadenine and 3-deazaguanine and 3-deazaadenine. Further nucleobases include those disclosed in U.S. Pat. No. 3,687,808, those disclosed in Modified Nucleosides in Biochemistry, Biotechnology and Medicine, Herdewijn, P. ed. Wiley-VCH, 2008; those disclosed in The Concise Encyclopedia Of Polymer Science And Engineering, pages 858-859, Kroschwitz, J. L, ed. John Wiley & Sons, 1990, these disclosed by Englisch et al., Angewandte Chemie, International Edition, 1991, 30, 613, and those disclosed by Sanghvi, Y S., Chapter 15, dsRNA Research and Applications, pages 289-302, Crooke, S. T. and Lebleu, B., Ed., CRC Press, 1993. Certain of these nucleobases are particularly useful for increasing the binding affinity of the oligomeric compounds featured in the invention. These include 5-substituted pyrimidines, 6-azapyrimidines and N-2, N-6 and 0-6 substituted purines, including 2-aminopropyladenine, 5-propynyluracil and 5-propynylcytosine. 5-methylcytosine substitutions have been shown to increase nucleic acid duplex stability by 0.6-1.2° C. (Sanghvi, Y. S., Crooke, S. T. and Lebleu, B., Eds., dsRNA Research and Applications, CRC Press, Boca Raton, 1993, pp. 276-278) and are exemplary base substitutions, even more particularly when combined with 2′-O-methoxyethyl sugar modifications.

[0113] Representative U.S. patents that teach the preparation of certain of the above noted modified nucleobases as well as other modified nucleobases include, but are not limited to, the above noted U.S. Pat. No. 3,687,808, as well as U.S. Pat. Nos. 4,845,205; 5,130,30; 5,134,066; 5,175,273; 5,367,066; 5,432,272; 5,457,187; 5,459,255; 5,484,908; 5,502,177; 5,525,711; 5,552,540; 5,587,469; 5,594,121, 5,596,091; 5,614,617; 5,681,941; 6,015,886; 6,147,200; 6,166,197; 6,222,025; 6,235,887; 6,380,368; 6,528,640; 6,639,062; 6,617,438; 7,045,610; 7,427,672; and 7,495,088, each of which is herein incorporated by reference, and U.S. Pat. No. 5,750,692, also herein incorporated by reference.

[0114] The RNA of an iRNA can also be modified to include one or more locked nucleic acids (LNA). A locked nucleic acid is a nucleotide having a modified ribose moiety in which the ribose moiety comprises an extra bridge connecting the 2′ and 4′ carbons. This structure effectively “locks” the ribose in the 3′-endo structural conformation. The addition of locked nucleic acids to siRNAs has been shown to increase siRNA stability in serum, and to reduce off-target effects (Elmen, J. et al., (2005) Nucleic Acids Research 33(1):439-447; Mook, OR. et al., (2007) Mol Canc Ther 6(3):833-843; Grunweller, A. et al., (2003) Nucleic Acids Research 31(12):3185-3193).

[0115] Representative U.S. Patents that teach the preparation of locked nucleic acid nucleotides include, but are not limited to, the following: U.S. Pat. Nos. 6,268,490; 6,670,461; 6,794,499; 6,998,484; 7,053,207; 7,084,125; and 7,399,845, each of which is herein incorporated by reference in its entirety.

[0116] Another modification of the RNA of an iRNA featured in the invention involves chemically linking to the RNA one or more ligands, moieties or conjugates that enhance the activity, cellular distribution, pharmacokinetic properties, or cellular uptake of the iRNA. Such moieties include but are not limited to lipid moieties such as a cholesterol moiety (Letsinger et al., Proc. Natl. Acid. Sci. USA, 1989, 86: 6553-6556), cholic acid (Manoharan et al., Biorg. Med. Chem. Let., 1994, 4:1053-1060), a thioether, e.g., beryl-S-tritylthiol (Manoharan et al., Ann. N.Y. Acad. Sci., 1992, 660:306-309; Manoharan et al., Biorg. Med. Chem. Let., 1993, 3:2765-2770), a thiocholesterol (Oberhauser et al., Nucl. Acids Res., 1992, 20:533-538), an aliphatic chain, e.g., dodecandiol or undecyl residues (Saison-Behmoaras et al., EMBO J, 1991, 10:1111-1118; Kabanov et al., FEBS Lett., 1990, 259:327-330; Svinarchuk et al., Biochimie, 1993, 75:49-54), a phospholipid, e.g., di-hexadecyl-rac-glycerol or triethyl-ammonium 1,2-di-O-hexadecyl-rac-glycero-3-phosphonate (Manoharan et al., Tetrahedron Lett., 1995, 36:3651-3654; Shea et al., Nucl. Acids Res., 1990, 18:3777-3783), a polyamine or a polyethylene glycol chain (Manoharan et al., Nucleosides & Nucleotides, 1995, 14:969-973), or adamantane acetic acid (Manoharan et al., Tetrahedron Lett., 1995, 36:3651-3654), a palmityl moiety (Mishra et al., Biochim. Biophys. Acta, 1995, 1264:229-237), or an octadecylamine or hexylamino-carbonyloxycholesterol moiety (Crooke et al., J. Pharmacol. Exp. Ther., 1996, 277:923-937).

[0117] In one embodiment, a ligand alters the distribution, targeting or lifetime of an iRNA agent into which it is incorporated. In preferred embodiments a ligand provides an enhanced affinity for a selected target, e.g., molecule, cell or cell type, compartment, e.g., a cellular or organ compartment, tissue, organ or region of the body, as, e.g., compared to a species absent such a ligand. Preferred ligands will not take part in duplex pairing in a duplexed nucleic acid.

[0118] Ligands can include a naturally occurring substance, such as a protein (e.g., human serum albumin (HSA), low-density lipoprotein (LDL), or globulin); carbohydrate (e.g., a dextran, pullulan, chitin, chitosan, inulin, cyclodextrin or hyaluronic acid); or a lipid. The ligand may also be a recombinant or synthetic molecule, such as a synthetic polymer, e.g., a synthetic polyamino acid. Examples of polyamino acids include polyamino acid is a polylysine (PLL), poly L-aspartic acid, poly L-glutamic acid, styrene-maleic acid anhydride copolymer, poly(L-lactide-co-glycolied) copolymer, divinyl ether-maleic anhydride copolymer, N-(2-hydroxypropyl)methacrylamide copolymer (HMPA), polyethylene glycol (PEG), polyvinyl alcohol (PVA), polyurethane, poly(2-ethylacryllic acid), N-isopropylacrylamide polymers, or polyphosphazine. Example of polyamines include: polyethylenimine, polylysine (PLL), spermine, spermidine, polyamine, pseudopeptide-polyamine, peptidomimetic polyamine, dendrimer polyamine, arginine, amidine, protamine, cationic lipid, cationic porphyrin, quaternary salt of a polyamine, or an alpha helical peptide.

[0119] Ligands can also include targeting groups, e.g., a cell or tissue targeting agent, e.g., a lectin, glycoprotein, lipid or protein, e.g., an antibody, that binds to a specified cell type such as a kidney cell. A targeting group can be a thyrotropin, melanotropin, lectin, glycoprotein, surfactant protein A, Mucin carbohydrate, multivalent lactose, multivalent galactose, N-acetyl-galactosamine, N-acetyl-gulucosamine multivalent mannose, multivalent fucose, glycosylated polyaminoacids, multivalent galactose, transferrin, bisphosphonate, polyglutamate, polyaspartate, a lipid, cholesterol, a steroid, bile acid, folate, vitamin B12, vitamin A, biotin, or an RGD peptide or RGD peptide mimetic.

[0120] Other examples of ligands include dyes, intercalating agents (e.g. acridines), cross-linkers (e.g. psoralene, mitomycin C), porphyrins (TPPC4, texaphyrin, Sapphyrin), polycyclic aromatic hydrocarbons (e.g., phenazine, dihydrophenazine), artificial endonucleases (e.g. EDTA), lipophilic molecules, e.g., cholesterol, cholic acid, adamantane acetic acid, 1-pyrene butyric acid, dihydrotestosterone, 1,3-Bis-O(hexadecyl)glycerol, geranyloxyhexyl group, hexadecylglycerol, borneol, menthol, 1,3-propanediol, heptadecyl group, palmitic acid, myristic acid,03-(oleoyl)lithocholic acid, 03-(oleoyl)cholenic acid, dimethoxytrityl, or phenoxazine) and peptide conjugates (e.g., antennapedia peptide, Tat peptide), alkylating agents, phosphate, amino, mercapto, PEG (e.g., PEG-40K), MPEG, [MPEG]₂, polyamino, alkyl, substituted alkyl, radiolabeled markers, enzymes, haptens (e.g., biotin), transport/absorption facilitators (e.g., aspirin, vitamin E, folic acid), synthetic ribonucleases (e.g., imidazole, bisimidazole, histamine, imidazole clusters, acridine-imidazole conjugates, Eu3+ complexes of tetraazamacrocycles), dinitrophenyl, HRP, or AP.

[0121] Ligands can be proteins, e.g., glycoproteins, or peptides, e.g., molecules having a specific affinity for a co-ligand, or antibodies e.g., an antibody, that binds to a specified cell type such as a cancer cell, endothelial cell, or bone cell. Ligands may also include hormones and hormone receptors. They can also include non-peptidic species, such as lipids, lectins, carbohydrates, vitamins, cofactors, multivalent lactose, multivalent galactose, N-acetyl-galactosamine, N-acetyl-gulucosamine multivalent mannose, or multivalent fucose. The ligand can be, for example, a lipopolysaccharide, an activator of p38 MAP kinase, or an activator of NF-κB.

[0122] The ligand can be a substance, e.g, a drug, which can increase the uptake of the iRNA agent into the cell, for example, by disrupting the cell's cytoskeleton, e.g., by disrupting the cell's microtubules, microfilaments, and/or intermediate filaments. The drug can be, for example, taxon, vincristine, vinblastine, cytochalasin, nocodazole, japlakinolide, latrunculin A, phalloidin, swinholide A, indanocine, or myoservin.

[0123] In some embodiments, a ligand attached to an iRNA as described herein acts as a pharmacokinetic (PK) modulator. As used herein, a “PK modulator” refers to a pharmacokinetic modulator. PK modulators include lipophiles, bile acids, steroids, phospholipid analogues, peptides, protein binding agents, PEG, vitamins etc. Examplary PK modulators include, but are not limited to, cholesterol, fatty acids, cholic acid, lithocholic acid, dialkylglycerides, diacylglyceride, phospholipids, sphingolipids, naproxen, ibuprofen, vitamin E, biotin etc. Oligonucleotides that comprise a number of phosphorothioate linkages are also known to bind to serum protein, thus short oligonucleotides, e.g., oligonucleotides of about 5 bases, 10 bases, 15 bases or 20 bases, comprising multiple of phosphorothioate linkages in the backbone are also amenable to the present invention as ligands (e.g. as PK modulating ligands). In addition, aptamers that bind serum components (e.g. serum proteins) are also suitable for use as PK modulating ligands in the embodiments described herein.

[0124] For macromolecular drugs and hydrophilic drug molecules, which cannot easily cross bilayer membranes, entrapment in endosomal/lysosomal compartments of the cell is thought to be the biggest hurdle for effective delivery to their site of action. In recent years, a number of approaches and strategies have been devised to address this problem. For liposomal formulations, the use of fusogenic lipids in the formulation have been the most common approach (Singh, R. S., Goncalves, C. et al. (2004). On the Gene Delivery Efficacies of pH-Sensitive Cationic Lipids via Endosomal Protonation. A Chemical Biology Investigation. Chem. Biol. 11, 713-723.). Other components, which exhibit pH-sensitive endosomolytic activity through protonation and/or pH-induced conformational changes, include charged polymers and peptides. Examples may be found in Hoffman, A. S., Stayton, P. S. et al. (2002). Design of “smart” polymers that can direct intracellular drug delivery. Polymers Adv. Technol. 13, 992-999; Kakudo, Chaki, T., S. et al. (2004). Transferrin-Modified Liposomes Equipped with a pH-Sensitive Fusogenic Peptide: An Artificial Viral-like Delivery System. Biochemistry 436, 5618-5628; Yessine, M. A. and Leroux, J. C. (2004). Membrane-destabilizing polyanions: interaction with lipid bilayers and endosomal escape of biomacromolecules. Adv. Drug Deliv. Rev. 56, 999-1021; Oliveira, S., van Rooy, I. et al. (2007). Fusogenic peptides enhance endosomal escape improving iRNA-induced silencing of oncogenes. Int. J. Pharm. 331, 211-4. They have generally been used in the context of drug delivery systems, such as liposomes or lipoplexes. For folate receptor-mediated delivery using liposomal formulations, for instance, a pH-sensitive fusogenic peptide has been incorporated into the liposomes and shown to enhance the activity through improving the unloading of drug during the uptake process (Turk, M. J., Reddy, J. A. et al. (2002). Characterization of a novel pH-sensitive peptide that enhances drug release from folate-targeted liposomes at endosomal pHs is described in Biochim. Biophys. Acta 1559, 56-68).

[0125] In certain embodiments, the endosomolytic components of the present invention can be polyanionic peptides or peptidomimetics which show pH-dependent membrane activity and/or fusogenicity. A peptidomimetic can be a small protein-like chain designed to mimic a peptide. A peptidomimetic can arise from modification of an existing peptide in order to alter the molecule's properties, or the synthesis of a peptide-like molecule using unnatural amino acids or their analogs. In certain embodiments, they have improved stability and/or biological activity when compared to a peptide. In certain embodiments, the endosomolytic component assumes its active conformation at endosomal pH (e.g., pH 5-6). The “active” conformation is that conformation in which the endosomolytic component promotes lysis of the endosome and/or transport of the modular composition of the invention, or its any of its components (e.g., a nucleic acid), from the endosome to the cytoplasm of the cell.

[0126] Libraries of compounds can be screened for their differential membrane activity at endosomal pH versus neutral pH using a hemolysis assay. Promising candidates isolated by this method may be used as components of the modular compositions of the invention. A method for identifying an endosomolytic component for use in the compositions and methods of the present invention may comprise: providing a library of compounds; contacting blood cells with the members of the library, wherein the pH of the medium in which the contact occurs is controlled; determining whether the compounds induce differential lysis of blood cells at a low pH (e.g., about pH 5-6) versus neutral pH (e.g., about pH 7-8).

[0127] Exemplary endosomolytic components include the GALA peptide (Subbarao et al., Biochemistry, 1987, 26: 2964-2972), the EALA peptide (Vogel et al., J. Am. Chem. Soc., 1996, 118: 1581-1586), and their derivatives (Turk et al., Biochem. Biophys. Acta, 2002, 1559: 56-68). In certain embodiments, the endosomolytic component can contain a chemical group (e.g., an amino acid) which will undergo a change in charge or protonation in response to a change in pH. The endosomolytic component may be linear or branched. Exemplary primary sequences of endosomolytic components include ***H2N-(AALEALAEALEALAEALEALAEAAAAGGC)-CO2H (SEQ ID NO: 873); H2N-(AALAEALAEALAEALAEALAEALAAAAGGC)-CO2H (SEQ ID NO: 874); and H2N-(ALEALAEALEALAEA)-CONH2 (SEQ ID NO: 875).

[0128] In certain embodiments, more than one endosomolytic component can be incorporated into the iRNA agent of the invention. In some embodiments, this will entail incorporating more than one of the same endosomolytic component into the iRNA agent. In other embodiments, this will entail incorporating two or more different endosomolytic components into iRNA agent.

[0129] These endosomolytic components can mediate endosomal escape by, for example, changing conformation at endosomal pH. In certain embodiments, the endosomolytic components can exist in a random coil conformation at neutral pH and rearrange to an amphipathic helix at endosomal pH. As a consequence of this conformational transition, these peptides may insert into the lipid membrane of the endosome, causing leakage of the endosomal contents into the cytoplasm. Because the conformational transition is pH-dependent, the endosomolytic components can display little or no fusogenic activity while circulating in the blood (pH˜7.4). “Fusogenic activity,” as used herein, is defined as that activity which results in disruption of a lipid membrane by the endosomolytic component. One example of fusogenic activity is the disruption of the endosomal membrane by the endosomolytic component, leading to endosomal lysis or leakage and transport of one or more components of the modular composition of the invention (e.g., the nucleic acid) from the endosome into the cytoplasm.

[0130] In addition to hemolysis assays, as described herein, suitable endosomolytic components can be tested and identified by a skilled artisan using other methods. For example, the ability of a compound to respond to, e.g., change charge depending on, the pH environment can be tested by routine methods, e.g., in a cellular assay. In certain embodiments, a test compound is combined with or contacted with a cell, and the cell is allowed to internalize the test compound, e.g., by endocytosis. An endosome preparation can then be made from the contacted cells and the endosome preparation compared to an endosome preparation from control cells. A change, e.g., a decrease, in the endosome fraction from the contacted cell vs. the control cell indicates that the test compound can function as a fusogenic agent. Alternatively, the contacted cell and control cell can be evaluated, e.g., by microscopy, e.g., by light or electron microscopy, to determine a difference in the endosome population in the cells. The test compound and/or the endosomes can labeled, e.g., to quantify endosomal leakage.

[0131] In another type of assay, an iRNA agent described herein is constructed using one or more test or putative fusogenic agents. The iRNA agent can be labeled for easy visualization. The ability of the endosomolytic component to promote endosomal escape, once the iRNA agent is taken up by the cell, can be evaluated, e.g., by preparation of an endosome preparation, or by microscopy techniques, which enable visualization of the labeled iRNA agent in the cytoplasm of the cell. In certain other embodiments, the inhibition of gene expression, or any other physiological parameter, may be used as a surrogate marker for endosomal escape.

[0132] In other embodiments, circular dichroism spectroscopy can be used to identify compounds that exhibit a pH-dependent structural transition.

[0133] A two-step assay can also be performed, wherein a first assay evaluates the ability of a test compound alone to respond to changes in pH, and a second assay evaluates the ability of a modular composition that includes the test compound to respond to changes in pH. Lipid Conjugates

[0134] In one embodiment of the aspects described herein, a ligand or conjugate is a lipid or lipid-based molecule. Such a lipid or lipid-based molecule preferably binds a serum protein, e.g., human serum albumin (HSA). An HSA binding ligand allows for distribution of the conjugate to a target tissue, e.g., a non-kidney target tissue of the body. For example, the target tissue can be the liver, including parenchymal cells of the liver. Other molecules that can bind HSA can also be used as ligands. For example, neproxin or aspirin can be used. A lipid or lipid-based ligand can (a) increase resistance to degradation of the conjugate, (b) increase targeting or transport into a target cell or cell membrane, and/or (c) can be used to adjust binding to a serum protein, e.g., HSA.

[0135] A lipid based ligand can be used to modulate, e.g., control the binding of the conjugate to a target tissue. For example, a lipid or lipid-based ligand that binds to HSA more strongly will be less likely to be targeted to the kidney and therefore less likely to be cleared from the body. A lipid or lipid-based ligand that binds to HSA less strongly can be used to target the conjugate to the kidney.

[0136] In a preferred embodiment, the lipid based ligand binds HSA. Preferably, it binds HSA with a sufficient affinity such that the conjugate will be preferably distributed to a non-kidney tissue. However, it is preferred that the affinity not be so strong that the HSA-ligand binding cannot be reversed.

[0137] In another preferred embodiment, the lipid based ligand binds HSA weakly or not at all, such that the conjugate will be preferably distributed to the kidney. Other moieties that target to kidney cells can also be used in place of or in addition to the lipid based ligand.

[0138] In another aspect, the ligand is a moiety, e.g., a vitamin, which is taken up by a target cell, e.g., a proliferating cell. These are particularly useful for treating disorders characterized by unwanted cell proliferation, e.g., of the malignant or non-malignant type, e.g., cancer cells. Exemplary vitamins include vitamin A, E, and K. Other exemplary vitamins include are B vitamin, e.g., folic acid, B12, riboflavin, biotin, pyridoxal or other vitamins or nutrients taken up by cancer cells. Also included are HSA and low density lipoprotein (LDL).

[0139] In another aspect, the ligand is a cell-permeation agent, preferably a helical cell-permeation agent. Preferably, the agent is amphipathic. An exemplary agent is a peptide such as tat or antennopedia. If the agent is a peptide, it can be modified, including a peptidylmimetic, invertomers, non-peptide or pseudo-peptide linkages, and use of D-amino acids. The helical agent is preferably an alpha-helical agent, which preferably has a lipophilic and a lipophobic phase.

### Cell Permeation Peptides

[0140] Peptides suitable for use with the present invention can be a natural peptide, e.g., tat or antennopedia peptide, a synthetic peptide, or a peptidomimetic. Furthermore, the peptide can be a modified peptide, for example peptide can comprise non-peptide or pseudo-peptide linkages, and D-amino acids. A peptidomimetic (also referred to herein as an oligopeptidomimetic) is a molecule capable of folding into a defined three-dimensional structure similar to a natural peptide. The attachment of peptide and peptidomimetics to iRNA agents can affect pharmacokinetic distribution of the iRNA, such as by enhancing cellular recognition and absorption. The peptide or peptidomimetic moiety can be about 5-50 amino acids long, e.g., about 5, 10, 15, 20, 25, 30, 35, 40, 45, or 50 amino acids long.

[0141] A peptide or peptidomimetic can be, for example, a cell permeation peptide, cationic peptide, amphipathic peptide, or hydrophobic peptide (e.g., consisting primarily of Tyr, Trp or Phe). The peptide moiety can be a dendrimer peptide, constrained peptide or crosslinked peptide. In another alternative, the peptide moiety can include a hydrophobic membrane translocation sequence (MTS). An exemplary hydrophobic MTS-containing peptide is RFGF having the amino acid sequence AAVALLPAVLLALLAP (SEQ ID NO:1). An RFGF analogue (e.g., amino acid sequence AALLPVLLAAP (SEQ ID NO:2)) containing a hydrophobic MTS can also be a targeting moiety. The peptide moiety can be a “delivery” peptide, which can carry large polar molecules including peptides, oligonucleotides, and protein across cell membranes. For example, sequences from the HIV Tat protein (GRKKRRQRRRPPQ (SEQ ID NO:3)) and the Drosophila antennapedia protein (RQIKIWFQNRRMKWKK (SEQ ID NO: 4)) have been found to be capable of functioning as delivery peptides. A peptide or peptidomimetic can be encoded by a random sequence of DNA, such as a peptide identified from a phage-display library, or one-bead-one-compound (OBOC) combinatorial library (Lam et al., Nature, 354:82-84, 1991). Preferably the peptide or peptidomimetic tethered to a dsRNA agent via an incorporated monomer unit is a cell targeting peptide such as an arginine-glycine-aspartic acid (RGD)-peptide, or RGD mimic. A peptide moiety can range in length from about 5 amino acids to about 40 amino acids. The peptide moieties can have a structural modification, such as to increase stability or direct conformational properties. Any of the structural modifications described below can be utilized.

[0142] An RGD peptide moiety can be used to target a tumor cell, such as an endothelial tumor cell or a breast cancer tumor cell (Zitzmann et al., Cancer Res., 62:5139-43, 2002). An RGD peptide can facilitate targeting of an dsRNA agent to tumors of a variety of other tissues, including the lung, kidney, spleen, or liver (Aoki et al., Cancer Gene Therapy 8:783-787, 2001). Preferably, the RGD peptide will facilitate targeting of an iRNA agent to the kidney. The RGD peptide can be linear or cyclic, and can be modified, e.g., glycosylated or methylated to facilitate targeting to specific tissues. For example, a glycosylated RGD peptide can deliver a iRNA agent to a tumor cell expressing avB3 (Haubner et al., Jour. Nucl. Med., 42:326-336, 2001).

[0143] Peptides that target markers enriched in proliferating cells can be used, e.g., RGD containing peptides and peptidomimetics can target cancer cells, in particular cells that exhibit an αvβ integrin. Thus, one could use RGD peptides, cyclic peptides containing RGD, RGD peptides that include D-amino acids, as well as synthetic RGD mimics. In addition to RGD, one can use other moieties that target the αvβ integrin ligand. Generally, such ligands can be used to control proliferating cells and angiogenesis.

[0144] A “cell permeation peptide” is capable of permeating a cell, e.g., a microbial cell, such as a bacterial or fungal cell, or a mammalian cell, such as a human cell. A microbial cell-permeating peptide can be, for example, an α-helical linear peptide (e.g., LL-37 or Ceropin P1), a disulfide bond-containing peptide (e.g., α-defensin, β-defensin or bactenecin), or a peptide containing only one or two dominating amino acids (e.g., PR-39 or indolicidin). A cell permeation peptide can also include a nuclear localization signal (NLS). For example, a cell permeation peptide can be a bipartite amphipathic peptide, such as MPG, which is derived from the fusion peptide domain of HIV-1 gp41 and the NLS of SV40 large T antigen (Simeoni et al., Nucl. Acids Res. 31:2717-2724, 2003).

### Carbohydrate Conjugates

[0145] In some embodiments, the iRNA oligonucleotides described herein further comprise carbohydrate conjugates. The carbohydrate conjugates are advantageous for the in vivo delivery of nucleic acids, as well as compositions suitable for in vivo therapeutic use, as described herein. As used herein, “carbohydrate” refers to a compound which is either a carbohydrate per se made up of one or more monosaccharide units having at least 6 carbon atoms (which may be linear, branched or cyclic) with an oxygen, nitrogen or sulfur atom bonded to each carbon atom; or a compound having as a part thereof a carbohydrate moiety made up of one or more monosaccharide units each having at least six carbon atoms (which may be linear, branched or cyclic), with an oxygen, nitrogen or sulfur atom bonded to each carbon atom. Representative carbohydrates include the sugars (mono-, di-, tri- and oligosaccharides containing from about 4-9 monosaccharide units), and polysaccharides such as starches, glycogen, cellulose and polysaccharide gums. Specific monosaccharides include Cₛ and above (preferably C₅-C₈) sugars; di- and trisaccharides include sugars having two or three monosaccharide units (preferably C₅-C₈).

[0146] In one embodiment, the carbohydrate conjugate is selected from the group consisting of:

[chemical structure]

[chemical structure]

[chemical structure]

[chemical structure]

[chemical structure]

### i.e., Formula II-Formula XXII.

[0147] Another representative carbohydrate conjugate for use in the embodiments described herein includes, but is not limited to,

[chemical structure]

when one of X or Y is an oligonucleotide, the other is a hydrogen.

[0148] In some embodiments, the carbohydrate conjugate further comprises other ligand such as, but not limited to, PK modulator, endosomolytic ligand, and cell permeation peptide.

### Linkers

[0149] In some embodiments, the conjugates described herein can be attached to the iRNA oligonucleotide with various linkers that can be cleavable or non cleavable.

[0150] The term “linker” or “linking group” means an organic moiety that connects two parts of a compound. Linkers typically comprise a direct bond or an atom such as oxygen or sulfur, a unit such as NR⁸, C(O), C(O)NH, SO, SO₂, SO₂NH or a chain of atoms, such as, but not limited to, substituted or unsubstituted alkyl, substituted or unsubstituted alkenyl, substituted or unsubstituted alkynyl, arylalkyl, arylalkenyl, arylalkynyl, heteroarylalkyl, heteroarylalkenyl, heteroarylalkynyl, heterocyclylalkyl, heterocyclylalkenyl, heterocyclylalkynyl, aryl, heteroaryl, heterocyclyl, cycloalkyl, cycloalkenyl, alkylarylalkyl, alkylarylalkenyl, alkylarylalkynyl, alkenylarylalkyl, alkenylarylalkenyl, alkenylarylalkynyl, alkynylarylalkyl, alkynylarylalkenyl, alkynylarylalkynyl, alkylheteroarylalkyl, alkylheteroarylalkenyl, alkylheteroarylalkynyl, alkenylheteroarylalkyl, alkenylheteroarylalkenyl, alkenylheteroarylalkynyl, alkynylheteroarylalkyl, alkynylheteroarylalkenyl, alkynylheteroarylalkynyl, alkylheterocyclylalkyl, alkylheterocyclylalkenyl, alkylhererocyclylalkynyl, alkenylheterocyclylalkyl, alkenylheterocyclylalkenyl, alkenylheterocyclylalkynyl, alkynylheterocyclylalkyl, alkynylheterocyclylalkenyl, alkynylheterocyclylalkynyl, alkylaryl, alkenylaryl, alkynylaryl, alkylheteroaryl, alkenylheteroaryl, alkynylhereroaryl, which one or more methylenes can be interrupted or terminated by O, S, S(O), SO₂, N(R⁸), C(O), substituted or unsubstituted aryl, substituted or unsubstituted heteroaryl, substituted or unsubstituted heterocyclic; where R⁸ is hydrogen, acyl, aliphatic or substituted aliphatic. In one embodiment, the linker is between 1-24 atoms, preferably 4-24 atoms, preferably 6-18 atoms, more preferably 8-18 atoms, and most preferably 8-16 atoms.

[0151] A cleavable linking group is one which is sufficiently stable outside the cell, but which upon entry into a target cell is cleaved to release the two parts the linker is holding together. In a preferred embodiment, the cleavable linking group is cleaved at least 10 times or more, preferably at least 100 times faster in the target cell or under a first reference condition (which can, e.g., be selected to mimic or represent intracellular conditions) than in the blood of a subject, or under a second reference condition (which can, e.g., be selected to mimic or represent conditions found in the blood or serum).

[0152] Cleavable linking groups are susceptible to cleavage agents, e.g., pH, redox potential or the presence of degradative molecules. Generally, cleavage agents are more prevalent or found at higher levels or activities inside cells than in serum or blood. Examples of such degradative agents include: redox agents which are selected for particular substrates or which have no substrate specificity, including, e.g., oxidative or reductive enzymes or reductive agents such as mercaptans, present in cells, that can degrade a redox cleavable linking group by reduction; esterases; endosomes or agents that can create an acidic environment, e.g., those that result in a pH of five or lower; enzymes that can hydrolyze or degrade an acid cleavable linking group by acting as a general acid, peptidases (which can be substrate specific), and phosphatases.

[0153] A cleavable linkage group, such as a disulfide bond can be susceptible to pH. The pH of human serum is 7.4, while the average intracellular pH is slightly lower, ranging from about 7.1-7.3. Endosomes have a more acidic pH, in the range of 5.5-6.0, and lysosomes have an even more acidic pH at around 5.0. Some linkers will have a cleavable linking group that is cleaved at a preferred pH, thereby releasing the cationic lipid from the ligand inside the cell, or into the desired compartment of the cell.

[0154] A linker can include a cleavable linking group that is cleavable by a particular enzyme. The type of cleavable linking group incorporated into a linker can depend on the cell to be targeted. For example, liver targeting ligands can be linked to the cationic lipids through a linker that includes an ester group. Liver cells are rich in esterases, and therefore the linker will be cleaved more efficiently in liver cells than in cell types that are not esterase-rich. Other cell-types rich in esterases include cells of the lung, renal cortex, and testis.

[0155] Linkers that contain peptide bonds can be used when targeting cell types rich in peptidases, such as liver cells and synoviocytes.

[0156] In general, the suitability of a candidate cleavable linking group can be evaluated by testing the ability of a degradative agent (or condition) to cleave the candidate linking group. It will also be desirable to also test the candidate cleavable linking group for the ability to resist cleavage in the blood or when in contact with other non-target tissue. Thus one can determine the relative susceptibility to cleavage between a first and a second condition, where the first is selected to be indicative of cleavage in a target cell and the second is selected to be indicative of cleavage in other tissues or biological fluids, e.g., blood or serum. The evaluations can be carried out in cell free systems, in cells, in cell culture, in organ or tissue culture, or in whole animals. It may be useful to make initial evaluations in cell-free or culture conditions and to confirm by further evaluations in whole animals. In preferred embodiments, useful candidate compounds are cleaved at least 2, 4, 10 or 100 times faster in the cell (or under in vitro conditions selected to mimic intracellular conditions) as compared to blood or serum (or under in vitro conditions selected to mimic extracellular conditions).

### Redox Cleavable Linking Groups

[0157] One class of cleavable linking groups are redox cleavable linking groups that are cleaved upon reduction or oxidation. An example of reductively cleavable linking group is a disulphide linking group (—S—S—). To determine if a candidate cleavable linking group is a suitable “reductively cleavable linking group,” or for example is suitable for use with a particular iRNA moiety and particular targeting agent one can look to methods described herein. For example, a candidate can be evaluated by incubation with dithiothreitol (DTT), or other reducing agent using reagents know in the art, which mimic the rate of cleavage which would be observed in a cell, e.g., a target cell. The candidates can also be evaluated under conditions which are selected to mimic blood or serum conditions. In a preferred embodiment, candidate compounds are cleaved by at most 10% in the blood. In preferred embodiments, useful candidate compounds are degraded at least 2, 4, 10 or 100 times faster in the cell (or under in vitro conditions selected to mimic intracellular conditions) as compared to blood (or under in vitro conditions selected to mimic extracellular conditions). The rate of cleavage of candidate compounds can be determined using standard enzyme kinetics assays under conditions chosen to mimic intracellular media and compared to conditions chosen to mimic extracellular media.

### Phosphate-Based Cleavable Linking Groups

[0158] Phosphate-based cleavable linking groups are cleaved by agents that degrade or hydrolyze the phosphate group. An example of an agent that cleaves phosphate groups in cells are enzymes such as phosphatases in cells. Examples of phosphate-based linking groups are —O—P(O)(ORk)-O—, —O—P(S)(ORk)-O—, —O—P(S)(SRk)-O—, —S—P(O)(ORk)-O—, —O—P(O)(ORk)-S—, —S—P(O)(ORk)-S—, —O—P(S)(ORk)-S—, —S—P(S)(ORk)-O—, —O—P(O)(Rk)-O—, —O—P(S)(Rk)-O—, —S—P(O)(Rk)-O—, —S—P(S)(Rk)-O—, conjugated-S—P(O)(Rk)-S—, —O—P(S)(Rk)-S—. Preferred embodiments are —O—P(O)(OH)-O—, —O—P(S)(OH)-O—, —O—P(S)(SH)-O—, —S—P(O)(OH)-O—, —O—P(O)(OH)—S—, —S—P(O)(OH)—S—, —O—P(S)(OH)—S—, —S—P(S)(OH)—O—, —O—P(O)(H)—O—, —O—P(S)(H)—O—, —S—P(O)(H)—O—, —S—P(S)(H)—O—, —S—P(O)(H)—S—, —O—P(S)(H)—S—. A preferred embodiment is —O—P(O)(OH)—O—. These candidates can be evaluated using methods analogous to those described above.

### Acid Cleavable Linking Groups

[0159] Acid cleavable linking groups are linking groups that are cleaved under acidic conditions. In preferred embodiments acid cleavable linking groups are cleaved in an acidic environment with a pH of about 6.5 or lower (e.g., about 6.0, 5.5, 5.0, or lower), or by agents such as enzymes that can act as a general acid. In a cell, specific low pH organelles, such as endosomes and lysosomes can provide a cleaving environment for acid cleavable linking groups. Examples of acid cleavable linking groups include but are not limited to hydrazones, esters, and esters of amino acids. Acid cleavable groups can have the general formula —C═NN—, C(O)O, or —OC(O). A preferred embodiment is when the carbon attached to the oxygen of the ester (the alkoxy group) is an aryl group, substituted alkyl group, or tertiary alkyl group such as dimethyl pentyl or t-butyl. These candidates can be evaluated using methods analogous to those described above.

### Ester-Based Linking Groups

[0160] Ester-based cleavable linking groups are cleaved by enzymes such as esterases and amidases in cells. Examples of ester-based cleavable linking groups include but are not limited to esters of alkylene, alkenylene and alkynylene groups. Ester cleavable linking groups have the general formula —C(O)O—, or —OC(O)-. These candidates can be evaluated using methods analogous to those described above.

### Peptide-Based Cleaving Groups

[0161] Peptide-based cleavable linking groups are cleaved by enzymes such as peptidases and proteases in cells. Peptide-based cleavable linking groups are peptide bonds formed between amino acids to yield oligopeptides (e.g., dipeptides, tripeptides etc.) and polypeptides. Peptide-based cleavable groups do not include the amide group (—C(O)NH-). The amide group can be formed between any alkylene, alkenylene or alkynelene. A peptide bond is a special type of amide bond formed between amino acids to yield peptides and proteins. The peptide based cleavage group is generally limited to the peptide bond (i.e., the amide bond) formed between amino acids yielding peptides and proteins and does not include the entire amide functional group. Peptide-based cleavable linking groups have the general formula —NHCHR^{A}C(O)NHCHR^{B}C(O)—, where R^{A} and R^{B} are the R groups of the two adjacent amino acids. These candidates can be evaluated using methods analogous to those described above.

[0162] Representative carbohydrate conjugates with linkers include, but are not limited to,

[chemical structure]

[chemical structure]

when one of X or Y is an oligonucleotide, the other is a hydrogen.

[0163] Representative U.S. patents that teach the preparation of RNA conjugates include, but are not limited to, U.S. Pat. Nos. 4,828,979; 4,948,882; 5,218,105; 5,525,465; 5,541,313; 5,545,730; 5,552,538; 5,578,717, 5,580,731; 5,591,584; 5,109,124; 5,118,802; 5,138,045; 5,414,077; 5,486,603; 5,512,439; 5,578,718; 5,608,046; 4,587,044; 4,605,735; 4,667,025; 4,762,779; 4,789,737; 4,824,941; 4,835,263; 4,876,335; 4,904,582; 4,958,013; 5,082,830; 5,112,963; 5,214,136; 5,082,830; 5,112,963; 5,214,136; 5,245,022; 5,254,469; 5,258,506; 5,262,536; 5,272,250; 5,292,873; 5,317,098; 5,371,241, 5,391,723; 5,416,203, 5,451,463; 5,510,475; 5,512,667; 5,514,785; 5,565,552; 5,567,810; 5,574,142; 5,585,481; 5,587,371; 5,595,726; 5,597,696; 5,599,923; 5,599,928 and 5,688,941; 6,294,664; 6,320,017; 6,576,752; 6,783,931; 6,900,297; 7,037,646; each of which is herein incorporated by reference.

[0164] It is not necessary for all positions in a given compound to be uniformly modified, and in fact more than one of the aforementioned modifications can be incorporated in a single compound or even at a single nucleoside within an iRNA. The present invention also includes iRNA compounds that are chimeric compounds. “Chimeric” iRNA compounds or “chimeras,” in the context of this invention, are iRNA compounds, preferably dsRNAs, which contain two or more chemically distinct regions, each made up of at least one monomer unit, i.e., a nucleotide in the case of a dsRNA compound. These iRNAs typically contain at least one region wherein the RNA is modified so as to confer upon the iRNA increased resistance to nuclease degradation, increased cellular uptake, and/or increased binding affinity for the target nucleic acid. An additional region of the iRNA may serve as a substrate for enzymes capable of cleaving RNA:DNA or RNA:RNA hybrids. By way of example, RNase H is a cellular endonuclease which cleaves the RNA strand of an RNA:DNA duplex. Activation of RNase H, therefore, results in cleavage of the RNA target, thereby greatly enhancing the efficiency of iRNA inhibition of gene expression. Consequently, comparable results can often be obtained with shorter iRNAs when chimeric dsRNAs are used, compared to phosphorothioate deoxy dsRNAs hybridizing to the same target region. Cleavage of the RNA target can be routinely detected by gel electrophoresis and, if necessary, associated nucleic acid hybridization techniques known in the art.

[0165] In certain instances, the RNA of an iRNA can be modified by a non-ligand group. A number of non-ligand molecules have been conjugated to iRNAs in order to enhance the activity, cellular distribution or cellular uptake of the iRNA, and procedures for performing such conjugations are available in the scientific literature. Such non-ligand moieties have included lipid moieties, such as cholesterol (Kubo, T. et al., Biochem. Biophys. Res. Comm., 2007, 365(1):54-61; Letsinger et al., Proc. Natl. Acad. Sci. USA, 1989, 86:6553), cholic acid (Manoharan et al., Bioorg. Med. Chem. Lett., 1994, 4:1053), a thioether, e.g., hexyl-S-tritylthiol (Manoharan et al., Ann. N.Y. Acad. Sci., 1992, 660:306; Manoharan et al., Bioorg. Med. Chem. Let., 1993, 3:2765), a thiocholesterol (Oberhauser et al., Nucl. Acids Res., 1992, 20:533), an aliphatic chain, e.g., dodecandiol or undecyl residues (Saison-Behmoaras et al., EMBO J., 1991, 10:111; Kabanov et al., FEBS Lett., 1990, 259:327; Svinarchuk et al., Biochimie, 1993, 75:49), a phospholipid, e.g., di-hexadecyl-rac-glycerol or triethylammonium 1,2-di-O-hexadecyl-rac-glycero-3-H-phosphonate (Manoharan et al., Tetrahedron Lett., 1995, 36:3651; Shea et al., Nucl. Acids Res., 1990, 18:3777), a polyamine or a polyethylene glycol chain (Manoharan et al., Nucleosides & Nucleotides, 1995, 14:969), or adamantane acetic acid (Manoharan et al., Tetrahedron Lett., 1995, 36:3651), a palmityl moiety (Mishra et al., Biochim. Biophys. Acta, 1995, 1264:229), or an octadecylamine or hexylamino-carbonyl-oxycholesterol moiety (Crooke et al., J. Pharmacol. Exp. Ther., 1996, 277:923). Representative United States patents that teach the preparation of such RNA conjugates have been listed above. Typical conjugation protocols involve the synthesis of an RNAs bearing an aminolinker at one or more positions of the sequence. The amino group is then reacted with the molecule being conjugated using appropriate coupling or activating reagents. The conjugation reaction may be performed either with the RNA still bound to the solid support or following cleavage of the RNA, in solution phase. Purification of the RNA conjugate by HPLC typically affords the pure conjugate.

Delivery of iRNA

[0166] The delivery of an iRNA to a subject in need thereof can be achieved in a number of different ways. In vivo delivery can be performed directly by administering a composition comprising an iRNA, e.g. a dsRNA, to a subject. Alternatively, delivery can be performed indirectly by administering one or more vectors that encode and direct the expression of the iRNA.

Delivery of an iRNA Composition

[0167] In general, any method of delivering a nucleic acid molecule can be adapted for use with an iRNA (see e.g., Akhtar S. and Julian R L. (1992) Trends Cell. Biol. 2(5):139-144 and WO94/02595, which are incorporated herein by reference in their entireties). However, there are three factors that are important to consider in order to successfully deliver an iRNA molecule in vivo: (a) biological stability of the delivered molecule, (2) preventing non-specific effects, and (3) accumulation of the delivered molecule in the target tissue. The non-specific effects of an iRNA can be minimized by local administration, for example by direct injection or implantation into a tissue (as a non-limiting example, a tumor) or topically administering the preparation. Local administration to a treatment site maximizes local concentration of the agent, limits the exposure of the agent to systemic tissues that may otherwise be harmed by the agent or that may degrade the agent, and permits a lower total dose of the iRNA molecule to be administered. Several studies have shown successful knockdown of gene products when an iRNA is administered locally. For example, intraocular delivery of a VEGF dsRNA by intravitreal injection in cynomolgus monkeys (Tolentino, M J., et al (2004) Retina 24:132-138) and subretinal injections in mice (Reich, S J., et al (2003) Mol. Vis. 9:210-216) were both shown to prevent neovascularization in an experimental model of age-related macular degeneration. In addition, direct intratumoral injection of a dsRNA in mice reduces tumor volume (Pille, J., et al (2005) Mol. Ther.11:267-274) and can prolong survival of tumor-bearing mice (Kim, W J., et al (2006) Mol. Ther. 14:343-350; Li, S., et al (2007) Mol. Ther. 15:515-523). RNA interference has also shown success with local delivery to the CNS by direct injection (Dorn, G., et al. (2004) Nucleic Acids 32:e49; Tan, P H., et al (2005) Gene Ther. 12:59-66; Makimura, H., et al (2002) BMC Neurosci. 3:18; Shishkina, G T., et al (2004) Neuroscience 129:521-528; Thakker, E R., et al (2004) Proc. Natl. Acad. Sci. U.S.A. 101:17270-17275; Akaneya,Y., et al (2005) J. Neurophysiol. 93:594-602) and to the lungs by intranasal administration (Howard, K A., et al (2006) Mol. Ther. 14:476-484; Zhang, X., et al (2004) J. Biol. Chem. 279:10677-10684; Bitko, V., et al (2005) Nat. Med. 11:50-55). For administering an iRNA systemically for the treatment of a disease, the RNA can be modified or alternatively delivered using a drug delivery system; both methods act to prevent the rapid degradation of the dsRNA by endo- and exo-nucleases in vivo. Modification of the RNA or the pharmaceutical carrier can also permit targeting of the iRNA composition to the target tissue and avoid undesirable off-target effects. iRNA molecules can be modified by chemical conjugation to lipophilic groups such as cholesterol to enhance cellular uptake and prevent degradation. For example, an iRNA directed against ApoB conjugated to a lipophilic cholesterol moiety was injected systemically into mice and resulted in knockdown of apoB mRNA in both the liver and jejunum (Soutschek, J., et al (2004) Nature 432:173-178). Conjugation of an iRNA to an aptamer has been shown to inhibit tumor growth and mediate tumor regression in a mouse model of prostate cancer (McNamara, J O., et al (2006) Nat. Biotechnol. 24:1005-1015). In an alternative embodiment, the iRNA can be delivered using drug delivery systems such as a nanoparticle, a dendrimer, a polymer, liposomes, or a cationic delivery system. Positively charged cationic delivery systems facilitate binding of an iRNA molecule (negatively charged) and also enhance interactions at the negatively charged cell membrane to permit efficient uptake of an iRNA by the cell. Cationic lipids, dendrimers, or polymers can either be bound to an iRNA, or induced to form a vesicle or micelle (see e.g., Kim SH., et al (2008) Journal of Controlled Release 129(2):107-116) that encases an iRNA. The formation of vesicles or micelles further prevents degradation of the iRNA when administered systemically. Methods for making and administering cationic- iRNA complexes are well within the abilities of one skilled in the art (see e.g., Sorensen, D R., et al (2003) J. Mol. Biol 327:761-766; Verma, U N., et al (2003) Clin. Cancer Res. 9:1291-1300; Arnold, A S et al (2007) J. Hypertens. 25:197-205, which are incorporated herein by reference in their entirety). Some non-limiting examples of drug delivery systems useful for systemic delivery of iRNAs include DOTAP (Sorensen, D R., et al (2003), supra; Verma, U N., et al (2003), supra), Oligofectamine, “solid nucleic acid lipid particles” (Zimmermann, T S., et al (2006) Nature 441:111-114), cardiolipin (Chien, P Y., et al (2005) Cancer Gene Ther. 12:321-328; Pal, A., et al (2005) Int J. Oncol. 26:1087-1091), polyethyleneimine (Bonnet ME., et al (2008) Pharm. Res. August 16 Epub ahead of print; Aigner, A. (2006) J. Biomed. Biotechnol. 71659), Arg-Gly-Asp (RGD) peptides (Liu, S. (2006) Mol. Pharm. 3:472-487), and polyamidoamines (Tomalia, D A., et al (2007) Biochem. Soc. Trans. 35:61-67; Yoo, H., et al (1999) Pharm. Res. 16:1799-1804). In some embodiments, an iRNA forms a complex with cyclodextrin for systemic administration. Methods for administration and pharmaceutical compositions of iRNAs and cyclodextrins can be found in U.S. Patent No. 7, 427, 605, which is herein incorporated by reference in its entirety.

Vector Encoded dsRNAs

[0168] In another aspect, iRNA targeting the CD274/PD-L1 gene can be expressed from transcription units inserted into DNA or RNA vectors (see, e.g., Couture, A, et al., TIG. (1996), 12:5-10; Skillern, A., et al., International PCT Publication No. WO 00/22113, Conrad, International PCT Publication No. WO 00/22114, and Conrad, U.S. Pat. No. 6,054,299). Expression can be transient (on the order of hours to weeks) or sustained (weeks to months or longer), depending upon the specific construct used and the target tissue or cell type. These transgenes can be introduced as a linear construct, a circular plasmid, or a viral vector, which can be an integrating or non-integrating vector. The transgene can also be constructed to permit it to be inherited as an extrachromosomal plasmid (Gassmann, et al., Proc. Natl. Acad. Sci. USA (1995) 92:1292).

[0169] The individual strand or strands of an iRNA can be transcribed from a promoter on an expression vector. Where two separate strands are to be expressed to generate, for example, a dsRNA, two separate expression vectors can be co-introduced (e.g., by transfection or infection) into a target cell. Alternatively each individual strand of a dsRNA can be transcribed by promoters both of which are located on the same expression plasmid. In one embodiment, a dsRNA is expressed as inverted repeat polynucleotides joined by a linker polynucleotide sequence such that the dsRNA has a stem and loop structure.

[0170] iRNA expression vectors are generally DNA plasmids or viral vectors. Expression vectors compatible with eukaryotic cells, preferably those compatible with vertebrate cells, can be used to produce recombinant constructs for the expression of an iRNA as described herein. Eukaryotic cell expression vectors are well known in the art and are available from a number of commercial sources. Typically, such vectors are provided containing convenient restriction sites for insertion of the desired nucleic acid segment. Delivery of iRNA expressing vectors can be systemic, such as by intravenous or intramuscular administration, by administration to target cells ex-planted from the patient followed by reintroduction into the patient, or by any other means that allows for introduction into a desired target cell.

[0171] iRNA expression plasmids can be transfected into target cells as a complex with cationic lipid carriers (e.g., Oligofectamine) or non-cationic lipid-based carriers (e.g., Transit-TKO™) Multiple lipid transfections for iRNA-mediated knockdowns targeting different regions of a target RNA over a period of a week or more are also contemplated by the invention. Successful introduction of vectors into host cells can be monitored using various known methods. For example, transient transfection can be signaled with a reporter, such as a fluorescent marker, such as Green Fluorescent Protein (GFP). Stable transfection of cells ex vivo can be ensured using markers that provide the transfected cell with resistance to specific environmental factors (e.g., antibiotics and drugs), such as hygromycin B resistance.

[0172] Viral vector systems which can be utilized with the methods and compositions described herein include, but are not limited to, (a) adenovirus vectors; (b) retrovirus vectors, including but not limited to lentiviral vectors, moloney murine leukemia virus, etc.; (c) adeno- associated virus vectors; (d) herpes simplex virus vectors; (e) SV 40 vectors; (f) polyoma virus vectors; (g) papilloma virus vectors; (h) picornavirus vectors; (i) pox virus vectors such as an orthopox, e.g., vaccinia virus vectors or avipox, e.g. canary pox or fowl pox; and (j) a helper-dependent or gutless adenovirus. Replication-defective viruses can also be advantageous. Different vectors will or will not become incorporated into the cells' genome. The constructs can include viral sequences for transfection, if desired. Alternatively, the construct may be incorporated into vectors capable of episomal replication, e.g EPV and EBV vectors. Constructs for the recombinant expression of an iRNA will generally require regulatory elements, e.g., promoters, enhancers, etc., to ensure the expression of the iRNA in target cells. Other aspects to consider for vectors and constructs are further described below.

[0173] Vectors useful for the delivery of an iRNA will include regulatory elements (promoter, enhancer, etc.) sufficient for expression of the iRNA in the desired target cell or tissue. The regulatory elements can be chosen to provide either constitutive or regulated/inducible expression.

[0174] Expression of the iRNA can be precisely regulated, for example, by using an inducible regulatory sequence that is sensitive to certain physiological regulators, e.g., circulating glucose levels, or hormones (Docherty et al., 1994, FASEB J. 8:20-24). Such inducible expression systems, suitable for the control of dsRNA expression in cells or in mammals include, for example, regulation by ecdysone, by estrogen, progesterone, tetracycline, chemical inducers of dimerization, and isopropyl-beta-D1-thiogalactopyranoside (IPTG). A person skilled in the art would be able to choose the appropriate regulatory/promoter sequence based on the intended use of the iRNA transgene.

[0175] In a specific embodiment, viral vectors that contain nucleic acid sequences encoding an iRNA can be used. For example, a retroviral vector can be used (see Miller et al., Meth. Enzymol. 217:581-599 (1993)). These retroviral vectors contain the components necessary for the correct packaging of the viral genome and integration into the host cell DNA. The nucleic acid sequences encoding an iRNA are cloned into one or more vectors, which facilitates delivery of the nucleic acid into a patient. More detail about retroviral vectors can be found, for example, in Boesen et al., Biotherapy 6:291-302 (1994), which describes the use of a retroviral vector to deliver the mdrl gene to hematopoietic stem cells in order to make the stem cells more resistant to chemotherapy. Other references illustrating the use of retroviral vectors in gene therapy are: Clowes et al., J. Clin. Invest. 93:644-651 (1994); Kiem et al., Blood 83:1467-1473 (1994); Salmons and Gunzberg, Human Gene Therapy 4:129-141 (1993); and Grossman and Wilson, Curr. Opin. in Genetics and Devel. 3:110-114 (1993). Lentiviral vectors contemplated for use include, for example, the HIV based vectors described in U.S. Pat. Nos. 6,143,520; 5,665,557; and 5,981,276, which are herein incorporated by reference.

[0176] Adenoviruses are also contemplated for use in delivery of iRNAs. Adenoviruses are especially attractive vehicles, e.g., for delivering genes to respiratory epithelia. Adenoviruses naturally infect respiratory epithelia where they cause a mild disease. Other targets for adenovirus-based delivery systems are liver, the central nervous system, endothelial cells, and muscle. Adenoviruses have the advantage of being capable of infecting non-dividing cells. Kozarsky and Wilson, Current Opinion in Genetics and Development 3:499-503 (1993) present a review of adenovirus-based gene therapy. Bout et al., Human Gene Therapy 5:3-10 (1994) demonstrated the use of adenovirus vectors to transfer genes to the respiratory epithelia of rhesus monkeys. Other instances of the use of adenoviruses in gene therapy can be found in Rosenfeld et al., Science 252:431-434 (1991); Rosenfeld et al., Cell 68:143-155 (1992); Mastrangeli et al., J. Clin. Invest. 91:225-234 (1993); PCT Publication WO94/12649; and Wang, et al., Gene Therapy 2:775-783 (1995). A suitable AV vector for expressing an iRNA featured in the invention, a method for constructing the recombinant AV vector, and a method for delivering the vector into target cells, are described in Xia H et al. (2002), Nat. Biotech. 20: 1006-1010.

[0177] Use of Adeno-associated virus (AAV) vectors is also contemplated (Walsh et al., Proc. Soc. Exp. Biol. Med. 204:289-300 (1993); U.S. Pat. No. 5,436,146). In one embodiment, the iRNA can be expressed as two separate, complementary single-stranded RNA molecules from a recombinant AAV vector having, for example, either the U6 or H1 RNA promoters, or the cytomegalovirus (CMV) promoter. Suitable AAV vectors for expressing the dsRNA featured in the invention, methods for constructing the recombinant AV vector, and methods for delivering the vectors into target cells are described in Samulski R et al. (1987), J. Virol. 61: 3096-3101; Fisher K J et al. (1996), J. Virol, 70: 520-532; Samulski R et al. (1989), J. Virol. 63: 3822-3826; U.S. Pat. Nos. 5,252,479; 5,139,941; International Patent Application No. WO 94/13788; and International Patent Application No. WO 93/24641, the entire disclosures of which are herein incorporated by reference.

[0178] Another preferred viral vector is a pox virus such as a vaccinia virus, for example an attenuated vaccinia such as Modified Virus Ankara (MVA) or NYVAC, an avipox such as fowl pox or canary pox.

[0179] The tropism of viral vectors can be modified by pseudotyping the vectors with envelope proteins or other surface antigens from other viruses, or by substituting different viral capsid proteins, as appropriate. For example, lentiviral vectors can be pseudotyped with surface proteins from vesicular stomatitis virus (VSV), rabies, Ebola, Mokola, and the like. AAV vectors can be made to target different cells by engineering the vectors to express different capsid protein serotypes; see, e.g., Rabinowitz J E et al. (2002), J Virol 76:791-801, the entire disclosure of which is herein incorporated by reference.

[0180] The pharmaceutical preparation of a vector can include the vector in an acceptable diluent, or can include a slow release matrix in which the gene delivery vehicle is imbedded. Alternatively, where the complete gene delivery vector can be produced intact from recombinant cells, e.g., retroviral vectors, the pharmaceutical preparation can include one or more cells which produce the gene delivery system.

Pharmaceutical Compositions Containing iRNA

[0181] In one embodiment, provided herein are pharmaceutical compositions containing an iRNA and a pharmaceutically acceptable carrier. The pharmaceutical composition containing the iRNA is useful for treating a disease or disorder associated with the expression or activity of a CD274/PD-L1 gene, such as pathological processes mediated by CD274/PD-L1 expression. Such pharmaceutical compositions are formulated based on the mode of delivery. One example is compositions that are formulated for systemic administration via parenteral delivery, e.g., by intravenous (IV) delivery. Another example is compositions that are formulated for direct delivery into the brain parenchyma, e.g., by infusion into the brain, such as by continuous pump infusion.

[0182] The pharmaceutical compositions featured herein are administered in dosages sufficient to inhibit expression of CD274/PD-L1 genes. In general, a suitable dose of iRNA will be in the range of 0.01 to 200.0 milligrams per kilogram body weight of the recipient per day, generally in the range of 1 to 50 mg per kilogram body weight per day. For example, the dsRNA can be administered at 0.05 mg/kg, 0.5 mg/kg, 1 mg/kg, 1.5 mg/kg, 2 mg/kg, 3 mg/kg, 10 mg/kg, 20 mg/kg, 30 mg/kg, 40 mg/kg, or 50 mg/kg per single dose. The pharmaceutical composition may be administered once daily, or the iRNA may be administered as two, three, or more sub-doses at appropriate intervals throughout the day or even using continuous infusion or delivery through a controlled release formulation. In that case, the iRNA contained in each sub-dose must be correspondingly smaller in order to achieve the total daily dosage. The dosage unit can also be compounded for delivery over several days, e.g., using a conventional sustained release formulation which provides sustained release of the iRNA over a several day period. Sustained release formulations are well known in the art and are particularly useful for delivery of agents at a particular site, such as could be used with the agents of the present invention. In this embodiment, the dosage unit contains a corresponding multiple of the daily dose.

[0183] The effect of a single dose on CD274/PD-L1 levels can be long lasting, such that subsequent doses are administered at not more than 3, 4, or 5 day intervals, or at not more than 1, 2, 3, or 4 week intervals.

[0184] The skilled artisan will appreciate that certain factors may influence the dosage and timing required to effectively treat a subject, including but not limited to the severity of the disease or disorder, previous treatments, the general health and/or age of the subject, and other diseases present. Moreover, treatment of a subject with a therapeutically effective amount of a composition can include a single treatment or a series of treatments. Estimates of effective dosages and in vivo half-lives for the individual iRNAs encompassed by the invention can be made using conventional methodologies or on the basis of in vivo testing using an appropriate animal model, as described elsewhere herein.

[0185] Advances in mouse genetics have generated a number of mouse models for the study of various human diseases, such as pathological processes mediated by CD274/PD-L1 expression. Such models can be used for in vivo testing of iRNA, as well as for determining a therapeutically effective dose. A suitable mouse model is, for example, a mouse containing a transgene expressing human CD274/PD-L1.

[0186] The present invention also includes pharmaceutical compositions and formulations that include the iRNA compounds featured in the invention. The pharmaceutical compositions of the present invention may be administered in a number of ways depending upon whether local or systemic treatment is desired and upon the area to be treated. Administration may be topical (e.g., by a transdermal patch), pulmonary, e.g., by inhalation or insufflation of powders or aerosols, including by nebulizer; intratracheal, intranasal, epidermal and transdermal, oral or parenteral. Parenteral administration includes intravenous, intraarterial, subcutaneous, intraperitoneal or intramuscular injection or infusion; subdermal, e.g., via an implanted device; or intracranial, e.g., by intraparenchymal, intrathecal or intraventricular, administration.

[0187] The iRNA can be delivered in a manner to target a particular tissue, such as the liver (e.g., the hepatocytes of the liver).

[0188] Pharmaceutical compositions and formulations for topical administration may include transdermal patches, ointments, lotions, creams, gels, drops, suppositories, sprays, liquids and powders. Conventional pharmaceutical carriers, aqueous, powder or oily bases, thickeners and the like may be necessary or desirable. Coated condoms, gloves and the like may also be useful. Suitable topical formulations include those in which the iRNAs featured in the invention are in admixture with a topical delivery agent such as lipids, liposomes, fatty acids, fatty acid esters, steroids, chelating agents and surfactants. Suitable lipids and liposomes include neutral (e.g., dioleoylphosphatidyl DOPE ethanolamine, dimyristoylphosphatidyl choline DMPC, distearolyphosphatidyl choline) negative (e.g., dimyristoylphosphatidyl glycerol DMPG) and cationic (e.g., dioleoyltetramethylaminopropyl DOTAP and dioleoylphosphatidyl ethanolamine DOTMA). iRNAs featured in the invention may be encapsulated within liposomes or may form complexes thereto, in particular to cationic liposomes. Alternatively, iRNAs may be complexed to lipids, in particular to cationic lipids. Suitable fatty acids and esters include but are not limited to arachidonic acid, oleic acid, eicosanoic acid, lauric acid, caprylic acid, capric acid, myristic acid, palmitic acid, stearic acid, linoleic acid, linolenic acid, dicaprate, tricaprate, monoolein, dilaurin, glyceryl 1-monocaprate, 1-dodecylazacycloheptan-2-one, an acylcarnitine, an acylcholine, or a C₁₋₂₀ alkyl ester (e.g., isopropylmyristate IPM), monoglyceride, diglyceride or pharmaceutically acceptable salt thereof. Topical formulations are described in detail in U.S. Pat. No. 6,747,014, which is incorporated herein by reference.

### Liposomal Formulations

[0189] There are many organized surfactant structures besides microemulsions that have been studied and used for the formulation of drugs. These include monolayers, micelles, bilayers and vesicles. Vesicles, such as liposomes, have attracted great interest because of their specificity and the duration of action they offer from the standpoint of drug delivery. As used in the present invention, the term “liposome” means a vesicle composed of amphiphilic lipids arranged in a spherical bilayer or bilayers.

[0190] Liposomes are unilamellar or multilamellar vesicles which have a membrane formed from a lipophilic material and an aqueous interior. The aqueous portion contains the composition to be delivered. Cationic liposomes possess the advantage of being able to fuse to the cell wall. Non-cationic liposomes, although not able to fuse as efficiently with the cell wall, are taken up by macrophages in vivo.

[0191] In order to traverse intact mammalian skin, lipid vesicles must pass through a series of fine pores, each with a diameter less than 50 nm, under the influence of a suitable transdermal gradient. Therefore, it is desirable to use a liposome which is highly deformable and able to pass through such fine pores.

[0192] Further advantages of liposomes include; liposomes obtained from natural phospholipids are biocompatible and biodegradable; liposomes can incorporate a wide range of water and lipid soluble drugs; liposomes can protect encapsulated drugs in their internal compartments from metabolism and degradation (Rosoff, in Pharmaceutical Dosage Forms, Lieberman, Rieger and Banker (Eds.), 1988, Marcel Dekker, Inc., New York, N.Y., volume 1, p. 245). Important considerations in the preparation of liposome formulations are the lipid surface charge, vesicle size and the aqueous volume of the liposomes.

[0193] Liposomes are useful for the transfer and delivery of active ingredients to the site of action. Because the liposomal membrane is structurally similar to biological membranes, when liposomes are applied to a tissue, the liposomes start to merge with the cellular membranes and as the merging of the liposome and cell progresses, the liposomal contents are emptied into the cell where the active agent may act.

[0194] Liposomal formulations have been the focus of extensive investigation as the mode of delivery for many drugs. There is growing evidence that for topical administration, liposomes present several advantages over other formulations. Such advantages include reduced side-effects related to high systemic absorption of the administered drug, increased accumulation of the administered drug at the desired target, and the ability to administer a wide variety of drugs, both hydrophilic and hydrophobic, into the skin.

[0195] Several reports have detailed the ability of liposomes to deliver agents including high-molecular weight DNA into the skin. Compounds including analgesics, antibodies, hormones and high-molecular weight DNAs have been administered to the skin. The majority of applications resulted in the targeting of the upper epidermis

[0196] Liposomes fall into two broad classes. Cationic liposomes are positively charged liposomes which interact with the negatively charged DNA molecules to form a stable complex. The positively charged DNA/liposome complex binds to the negatively charged cell surface and is internalized in an endosome. Due to the acidic pH within the endosome, the liposomes are ruptured, releasing their contents into the cell cytoplasm (Wang et al., Biochem. Biophys. Res. Commun., 1987, 147, 980-985).

[0197] Liposomes which are pH-sensitive or negatively-charged, entrap nucleic acids rather than complex with it. Since both the nucleic acid and the lipid are similarly charged, repulsion rather than complex formation occurs. Nevertheless, some nucleic acid is entrapped within the aqueous interior of these liposomes. pH-sensitive liposomes have been used to deliver nucleic acids encoding the thymidine kinase gene to cell monolayers in culture. Expression of the exogenous gene was detected in the target cells (Zhou et al., Journal of Controlled Release, 1992, 19, 269-274).

[0198] One major type of liposomal composition includes phospholipids other than naturally-derived phosphatidylcholine. Neutral liposome compositions, for example, can be formed from dimyristoyl phosphatidylcholine (DMPC) or dipalmitoyl phosphatidylcholine (DPPC). Anionic liposome compositions generally are formed from dimyristoyl phosphatidylglycerol, while anionic fusogenic liposomes are formed primarily from dioleoyl phosphatidylethanolamine (DOPE). Another type of liposomal composition is formed from phosphatidylcholine (PC) such as, for example, soybean PC, and egg PC. Another type is formed from mixtures of phospholipid and/or phosphatidylcholine and/or cholesterol.

[0199] Several studies have assessed the topical delivery of liposomal drug formulations to the skin. Application of liposomes containing interferon to guinea pig skin resulted in a reduction of skin herpes sores while delivery of interferon via other means (e.g., as a solution or as an emulsion) were ineffective (Weiner et al., Journal of Drug Targeting, 1992, 2, 405-410). Further, an additional study tested the efficacy of interferon administered as part of a liposomal formulation to the administration of interferon using an aqueous system, and concluded that the liposomal formulation was superior to aqueous administration (du Plessis et al., Antiviral Research, 1992, 18, 259-265).

[0200] Non-ionic liposomal systems have also been examined to determine their utility in the delivery of drugs to the skin, in particular systems comprising non-ionic surfactant and cholesterol. Non-ionic liposomal formulations comprising Novasome™ I (glyceryl dilaurate/cholesterol/polyoxyethylene-10-stearyl ether) and Novasome™ II (glyceryl distearate/cholesterol/polyoxyethylene-10-stearyl ether) were used to deliver cyclosporin-A into the dermis of mouse skin. Results indicated that such non-ionic liposomal systems were effective in facilitating the deposition of cyclosporine-A into different layers of the skin (Hu et al. S.T.P. Pharma. Sci., 1994, 4, 6, 466).

[0201] Liposomes also include “sterically stabilized” liposomes, a term which, as used herein, refers to liposomes comprising one or more specialized lipids that, when incorporated into liposomes, result in enhanced circulation lifetimes relative to liposomes lacking such specialized lipids. Examples of sterically stabilized liposomes are those in which part of the vesicle-forming lipid portion of the liposome (A) comprises one or more glycolipids, such as monosialoganglioside G_{M1}, or (B) is derivatized with one or more hydrophilic polymers, such as a polyethylene glycol (PEG) moiety. While not wishing to be bound by any particular theory, it is thought in the art that, at least for sterically stabilized liposomes containing gangliosides, sphingomyelin, or PEG-derivatized lipids, the enhanced circulation half-life of these sterically stabilized liposomes derives from a reduced uptake into cells of the reticuloendothelial system (RES) (Allen et al., FEBS Letters, 1987, 223, 42; Wu et al., Cancer Research, 1993, 53, 3765).

[0202] Various liposomes comprising one or more glycolipids are known in the art. Papahadjopoulos et al. (Ann. N.Y. Acad. Sci., 1987, 507, 64) reported the ability of monosialoganglioside G_{M1}, galactocerebroside sulfate and phosphatidylinositol to improve blood half-lives of liposomes. These findings were expounded upon by Gabizon et al. (Proc. Natl. Acad. Sci. U.S.A., 1988, 85, 6949). U.S. Pat. No. 4,837,028 and WO 88/04924, both to Allen et al., disclose liposomes comprising (1) sphingomyelin and (2) the ganglioside G_{M1} or a galactocerebroside sulfate ester. U.S. Pat. No. 5,543,152 (Webb et al.) discloses liposomes comprising sphingomyelin. Liposomes comprising 1,2-sn-dimyristoylphosphatidylcholine are disclosed in WO 97/13499 (Lim et al).

[0203] Many liposomes comprising lipids derivatized with one or more hydrophilic polymers, and methods of preparation thereof, are known in the art. Sunamoto et al. (Bull. Chem. Soc. Jpn., 1980, 53, 2778) described liposomes comprising a nonionic detergent, 2C1_{215G}, that contains a PEG moiety. Illum et al. (FEBS Lett., 1984, 167, 79) noted that hydrophilic coating of polystyrene particles with polymeric glycols results in significantly enhanced blood half-lives. Synthetic phospholipids modified by the attachment of carboxylic groups of polyalkylene glycols (e.g., PEG) are described by Sears (U.S. Pat. Nos. 4,426,330 and 4,534,899). Klibanov et al. (FEBS Lett., 1990, 268, 235) described experiments demonstrating that liposomes comprising phosphatidylethanolamine (PE) derivatized with PEG or PEG stearate have significant increases in blood circulation half-lives. Blume et al. (Biochimica et Biophysica Acta, 1990, 1029, 91) extended such observations to other PEG-derivatized phospholipids, e.g., DSPE-PEG, formed from the combination of distearoylphosphatidylethanolamine (DSPE) and PEG. Liposomes having covalently bound PEG moieties on their external surface are described in European Patent No. EP 0 445 131 B1 and WO 90/04384 to Fisher. Liposome compositions containing 1-20 mole percent of PE derivatized with PEG, and methods of use thereof, are described by Woodle et al. (U.S. Pat. Nos. 5,013,556 and 5,356,633) and Martin et al. (U.S. Pat. No. 5,213,804 and European Patent No. EP 0 496 813 B1). Liposomes comprising a number of other lipid-polymer conjugates are disclosed in WO 91/05545 and U.S. Pat. No. 5,225,212 (both to Martin et al.) and in WO 94/20073 (Zalipsky et al.) Liposomes comprising PEG-modified ceramide lipids are described in WO 96/10391 (Choi et al). U.S. Pat. No. 5,540,935 (Miyazaki et al.) and U.S. Pat. No. 5,556,948 (Tagawa et al.) describe PEG-containing liposomes that can be further derivatized with functional moieties on their surfaces.

[0204] A number of liposomes comprising nucleic acids are known in the art. WO 96/40062 to Thierry et al. discloses methods for encapsulating high molecular weight nucleic acids in liposomes. U.S. Pat. No. 5,264,221 to Tagawa et al. discloses protein-bonded liposomes and asserts that the contents of such liposomes may include a dsRNA. U.S. Pat. No. 5,665,710 to Rahman et al. describes certain methods of encapsulating oligodeoxynucleotides in liposomes. WO 97/04787 to Love et al. discloses liposomes comprising dsRNAs targeted to the raf gene.

[0205] Transfersomes are yet another type of liposomes, and are highly deformable lipid aggregates which are attractive candidates for drug delivery vehicles. Transfersomes may be described as lipid droplets which are so highly deformable that they are easily able to penetrate through pores which are smaller than the droplet. Transfersomes are adaptable to the environment in which they are used, e.g., they are self-optimizing (adaptive to the shape of pores in the skin), self-repairing, frequently reach their targets without fragmenting, and often self-loading. To make transfersomes it is possible to add surface edge-activators, usually surfactants, to a standard liposomal composition. Transfersomes have been used to deliver serum albumin to the skin. The transfersome-mediated delivery of serum albumin has been shown to be as effective as subcutaneous injection of a solution containing serum albumin.

[0206] Surfactants find wide application in formulations such as emulsions (including microemulsions) and liposomes. The most common way of classifying and ranking the properties of the many different types of surfactants, both natural and synthetic, is by the use of the hydrophile/lipophile balance (HLB). The nature of the hydrophilic group (also known as the “head”) provides the most useful means for categorizing the different surfactants used in formulations (Rieger, in Pharmaceutical Dosage Forms, Marcel Dekker, Inc., New York, N.Y., 1988, p. 285).

[0207] If the surfactant molecule is not ionized, it is classified as a nonionic surfactant. Nonionic surfactants find wide application in pharmaceutical and cosmetic products and are usable over a wide range of pH values. In general their HLB values range from 2 to about 18 depending on their structure. Nonionic surfactants include nonionic esters such as ethylene glycol esters, propylene glycol esters, glyceryl esters, polyglyceryl esters, sorbitan esters, sucrose esters, and ethoxylated esters. Nonionic alkanolamides and ethers such as fatty alcohol ethoxylates, propoxylated alcohols, and ethoxylated/propoxylated block polymers are also included in this class. The polyoxyethylene surfactants are the most popular members of the nonionic surfactant class.

[0208] If the surfactant molecule carries a negative charge when it is dissolved or dispersed in water, the surfactant is classified as anionic. Anionic surfactants include carboxylates such as soaps, acyl lactylates, acyl amides of amino acids, esters of sulfuric acid such as alkyl sulfates and ethoxylated alkyl sulfates, sulfonates such as alkyl benzene sulfonates, acyl isethionates, acyl taurates and sulfosuccinates, and phosphates. The most important members of the anionic surfactant class are the alkyl sulfates and the soaps.

[0209] If the surfactant molecule carries a positive charge when it is dissolved or dispersed in water, the surfactant is classified as cationic. Cationic surfactants include quaternary ammonium salts and ethoxylated amines. The quaternary ammonium salts are the most used members of this class.

[0210] If the surfactant molecule has the ability to carry either a positive or negative charge, the surfactant is classified as amphoteric. Amphoteric surfactants include acrylic acid derivatives, substituted alkylamides, N-alkylbetaines and phosphatides.

[0211] The use of surfactants in drug products, formulations and in emulsions has been reviewed (Rieger, in Pharmaceutical Dosage Forms, Marcel Dekker, Inc., New York, N.Y., 1988, p. 285).

### Nucleic Acid Lipid Particles

[0212] In one embodiment, a CD274/PD-L1 dsRNA featured in the invention is fully encapsulated in the lipid formulation, e.g., to forin a SPLP, pSPLP, SNALP, or other nucleic acid-lipid particle. As used herein, the term “SNALP” refers to a stable nucleic acid-lipid particle, including SPLP. As used herein, the term “SPLP” refers to a nucleic acid-lipid particle comprising plasmid DNA encapsulated within a lipid vesicle. SNALPs and SPLPs typically contain a cationic lipid, a non-cationic lipid, and a lipid that prevents aggregation of the particle (e.g., a PEG-lipid conjugate). SNALPs and SPLPs are extremely useful for systemic applications, as they exhibit extended circulation lifetimes following intravenous (i.v.) injection and accumulate at distal sites (e.g., sites physically separated from the administration site). SPLPs include “pSPLP,” which include an encapsulated condensing agent-nucleic acid complex as set forth in PCT Publication No. WO 00/03683. The particles of the present invention typically have a mean diameter of about 50 nm to about 150 nm, more typically about 60 nm to about 130 nm, more typically about 70 nm to about 110 nm, most typically about 70 nm to about 90 nm, and are substantially nontoxic. In addition, the nucleic acids when present in the nucleic acid- lipid particles of the present invention are resistant in aqueous solution to degradation with a nuclease. Nucleic acid-lipid particles and their method of preparation are disclosed in, e.g., U.S. Pat. Nos. 5,976,567; 5,981,501; 6,534,484; 6,586,410; 6,815,432; and PCT Publication No. WO 96/40964.

[0213] In one embodiment, the lipid to drug ratio (mass/mass ratio) (e.g., lipid to dsRNA ratio) will be in the range of from about 1:1 to about 50:1, from about 1:1 to about 25:1, from about 3:1 to about 15:1, from about 4:1 to about 10:1, from about 5:1 to about 9:1, or about 6:1 to about 9:1.

[0214] The cationic lipid can be, for example, N,N-dioleyl-N,N-dimethylammonium chloride (DODAC), N,N-distearyl-N,N-dimethylammonium bromide (DDAB), N-(I-(2,3-dioleoyloxy)propyl)-N,N,N-trimethylammonium chloride (DOTAP), N-(I-(2,3- dioleyloxy)propyl)-N,N,N-trimethylammonium chloride (DOTMA), N,N-dimethyl-2,3- dioleyloxy)propylamine (DODMA), 1,2-DiLinoleyloxy-N,N-dimethylaminopropane (DLinDMA), 1,2-Dilinolenyloxy-N,N-dimethylaminopropane (DLenDMA), 1,2-Dilinoleylcarbamoyloxy-3-dimethylaminopropane (DLin-C-DAP), 1,2-Dilinoleyoxy-3-(dimethylamino)acetoxypropane (DLin-DAC), 1,2-Dilinoleyoxy-3-morpholinopropane (DLin-MA), 1,2-Dilinoleoyl-3-dimethylaminopropane (DLinDAP), 1,2-Dilinoleylthio-3-dimethylaminopropane (DLin-S-DMA), 1-Linoleoyl-2-linoleyloxy-3-dimethylaminopropane (DLin-2-DMAP), 1,2-Dilinoleyloxy-3-trimethylaminopropane chloride salt (DLin-TMA.Cl), 1,2-Dilinoleoyl-3-trimethylaminopropane chloride salt (DLin-TAP.Cl), 1,2-Dilinoleyloxy-3-(N-methylpiperazino)propane (DLin-MPZ), or 3-(N,N-Dilinoleylamino)-1,2-propanediol (DLinAP), 3-(N,N-Dioleylamino)-1,2-propanedio (DOAP), 1,2-Dilinoleyloxo-3-(2-N,N-dimethylamino)ethoxypropane (DLin-EG-DMA), 1,2-Dilinolenyloxy-N,N-dimethylaminopropane (DLinDMA), 2,2-Dilinoleyl-4-dimethylaminomethyl-[1,3]-dioxolane (DLin-K-DMA) or analogs thereof, (3aR,5s,6aS)-N,N-dimethyl-2,2-di((9Z,12Z)-octadeca-9,12-dienyl)tetrahydro-3aH-cyclopenta[d][1,3]dioxol-5-amine (ALN100), (6Z,9Z,28Z,31Z)-heptatriaconta-6,9,28,31-tetraen-19-yl 4-(dimethylamino)butanoate (MC3), 1,1′-(2-(4-(2-((2-(bis(2-hydroxydodecyl)amino)ethyl)(2-hydroxydodecyl)amino)ethyl)piperazin-1-yl)ethylazanediyl)didodecan-2-ol (Tech GI), or a mixture thereof. The cationic lipid may comprise from about 20 mol % to about 50 mol % or about 40 mol % of the total lipid present in the particle.

[0215] In another embodiment, the compound 2,2-Dilinoleyl-4-dimethylaminoethyl-[1,3]-dioxolane can be used to prepare lipid-siRNA nanoparticles. Synthesis of 2,2-Dilinoleyl-4-dimethylaminoethyl-[1,3]-dioxolane is described in U.S. provisional patent application No. 61/107,998 filed on Oct. 23, 2008, which is herein incorporated by reference.

[0216] In one embodiment, the lipid-siRNA particle includes 40% 2, 2-Dilinoleyl-4-dimethylaminoethyl-[1,3]-dioxolane: 10% DSPC: 40% Cholesterol: 10% PEG-C-DOMG (mole percent) with a particle size of 63.0±20 nm and a 0.027 siRNA/Lipid Ratio.

[0217] The non-cationic lipid may be an anionic lipid or a neutral lipid including, but not limited to, distearoylphosphatidylcholine (DSPC), dioleoylphosphatidylcholine (DOPC), dipalmitoylphosphatidylcholine (DPPC), dioleoylphosphatidylglycerol (DOPG), dipalmitoylphosphatidylglycerol (DPPG), dioleoyl-phosphatidylethanolamine (DOPE), palmitoyloleoylphosphatidylcholine (POPC), palmitoyloleoylphosphatidylethanolamine (POPE), dioleoyl- phosphatidylethanolamine 4-(N-maleimidomethyl)-cyclohexane-l- carboxylate (DOPE-mal), dipalmitoyl phosphatidyl ethanolamine (DPPE), dimyristoylphosphoethanolamine (DMPE), distearoyl-phosphatidyl-ethanolamine (DSPE), 16-O-monomethyl PE, 16-O-dimethyl PE, 18-1-trans PE, 1-stearoyl-2-oleoyl- phosphatidyethanolamine (SOPE), cholesterol, or a mixture thereof. The non-cationic lipid may be from about 5 mol % to about 90 mol %, about 10 mol %, or about 58 mol % if cholesterol is included, of the total lipid present in the particle.

[0218] The conjugated lipid that inhibits aggregation of particles may be, for example, a polyethyleneglycol (PEG)-lipid including, without limitation, a PEG-diacylglycerol (DAG), a PEG-dialkyloxypropyl (DAA), a PEG-phospholipid, a PEG-ceramide (Cer), or a mixture thereof. The PEG-DAA conjugate may be, for example, a PEG-dilauryloxypropyl (Ci₂), a PEG-dimyristyloxypropyl (Ci₄), a PEG-dipalmityloxypropyl (Ci₆), or a PEG- distearyloxypropyl (C]s). The conjugated lipid that prevents aggregation of particles may be from 0 mol % to about 20 mol % or about 2 mol % of the total lipid present in the particle.

[0219] In some embodiments, the nucleic acid-lipid particle further includes cholesterol at, e.g., about 10 mol % to about 60 mol % or about 48 mol % of the total lipid present in the particle.

### LNP01

[0220] In one embodiment, the lipidoid ND98-4HC1 (MW 1487) (see U.S. patent application Ser. No. 12/056,230, filed Mar. 26, 2008, which is herein incorporated by reference in its entirety), Cholesterol (Sigma-Aldrich), and PEG-Ceramide C16 (Avanti Polar Lipids) can be used to prepare lipid-dsRNA nanoparticles (i.e., LNPO1 particles). Stock solutions of each in ethanol can be prepared as follows: ND98, 133 mg/ml; Cholesterol, 25 mg/ml, PEG-Ceramide C16, 100 mg/ml. The ND98, Cholesterol, and PEG-Ceramide C16 stock solutions can then be combined in a, e.g., 42:48:10 molar ratio. The combined lipid solution can be mixed with aqueous dsRNA (e.g., in sodium acetate pH 5) such that the final ethanol concentration is about 35-45% and the final sodium acetate concentration is about 100-300 mM. Lipid-dsRNA nanoparticles typically form spontaneously upon mixing. Depending on the desired particle size distribution, the resultant nanoparticle mixture can be extruded through a polycarbonate membrane (e.g., 100 nm cut-off) using, for example, a thermobarrel extruder, such as Lipex Extruder (Northern Lipids, Inc). In some cases, the extrusion step can be omitted. Ethanol removal and simultaneous buffer exchange can be accomplished by, for example, dialysis or tangential flow filtration. Buffer can be exchanged with, for example, phosphate buffered saline (PBS) at about pH 7, e.g., about pH 6.9, about pH 7.0, about pH 7.1, about pH 7.2, about pH 7.3, or about pH 7.4.

[chemical structure]

[0221] LNPO1 formulations are described, e.g., in International Application Publication No. WO 2008/042973, which is hereby incorporated by reference.

[0222] Additional exemplary lipid-dsRNA formulations are as follows:

| | | cationic lipid/ |
|---|---|---|
| | | non-cationic lipid/ |
| | | cholesterol/PEG- |
| | | lipid conjugate |
| | Cationic Lipid | Lipid:siRNA ratio |
| SNALP | 1,2-Dilinolenyloxy-N,N- | DLinDMA/DPPC/ |
| | dimethylaminopropane | Cholesterol/ |
| | (DLinDMA) | PEG-cDMA |
| | | (57.1/7.1/34.4/1.4) |
| | | lipid:siRNA ~7:1 |
| S-XTC | 2,2-Dilinoleyl-4- | XTC/DPPC/ |
| | dimethylaminoethyl- | Cholesterol/ |
| | [1,3]-dioxolane (XTC) | PEG-cDMA |
| | | 57.1/7.1/34.4/1.4 |
| | | lipid:siRNA ~7:1 |
| LNP05 | 2,2-Dilinoleyl-4- | XTC/DSPC/ |
| | dimethylaminoethyl-[1,3]- | Cholesterol/ |
| | dioxolane (XTC) | PEG-DMG |
| | | 57.5/7.5/31.5/3.5 |
| | | lipid:siRNA ~6:1 |
| LNP06 | 2,2-Dilinoleyl-4- | XTC/DSPC/ |
| | dimethylaminoethyl-[1,3]- | Cholesterol/ |
| | dioxolane (XTC) | PEG-DMG |
| | | 57.5/7.5/31.5/3.5 |
| | | lipid:siRNA ~11:1 |
| LNP07 | 2,2-Dilinoleyl-4- | XTC/DSPC/ |
| | dimethylaminoethyl-[1,3]- | Cholesterol/ |
| | dioxolane (XTC) | PEG-DMG |
| | | 60/7.5/31/1.5, |
| | | lipid:siRNA ~6:1 |
| LNP08 | 2:2-Dilinoleyl-4- | XTC/DSPC/ |
| | dimethylaminoethyl-[1,3]- | Cholesterol/ |
| | dioxolane (XTC) | PEG-DMG |
| | | 60/7.5/31/1.5, |
| | | lipid:siRNA ~11:1 |
| LNP09 | 2,2-Dilinoleyl-4- | XTC/DSPC/ |
| | dimethylaminoethyl-[1,3]- | Cholesterol/ |
| | dioxolane (XTC) | PEG-DMG |
| | | 50/10/38.5/1.5 |
| | | Lipid:siRNA 10:1 |
| LNP10 | (3aR,5s,6aS)-N,N-dimethyl-2,2- | ALN100/DSPC/ |
| | di((9Z,12Z)-octadeca-9,12- | Cholesterol/ |
| | dienyl)tetrahydro-3aH- | PEG-DMG |
| | cyclopenta[d][1,3]dioxol-5- | 50/10/38.5/1.5 |
| | amine (ALN100) | Lipid:siRNA 10:1 |
| LNP11 | (6Z,9Z,28Z,31Z)-heptatriaconta- | MC-3/DSPC/ |
| | 6,9,28,31-tetraen-19-yl 4- | Cholesterol/ |
| | (dimethylamino)butanoate | PEG-DMG |
| | (MC3) | 50/10/38.5/1.5 |
| | | Lipid:siRNA 10:1 |
| LNP12 | 1,1′-(2-(4-(2-((2-(bis(2- | C12-200/DSPC/ |
| | hydroxydodecyl)amino)ethyl)(2- | Cholesterol/ |
| | hydroxydodecyl)amino)ethyl) | PEG-DMG |
| | piperazin-1-yl)ethylazanediyl) | 50/10/38.5/1.5 |
| | didodecan-2-ol (C12-200) | Lipid:siRNA 10:1 |
| LNP13 | XTC | XTC/DSPC/ |
| | | Chol/PEG-DMG |
| | | 50/10/38.5/1.5 |
| | | Lipid:siRNA: 33:1 |
| LNP14 | MC3 | MC3/DSPC/ |
| | | Chol/PEG-DMG |
| | | 40/15/40/5 |
| | | Lipid:siRNA: 11:1 |
| LNP15 | MC3 | MC3/DSPC/ |
| | | Chol/PEG- |
| | | DSG/GalNAc- |
| | | PEG-DSG |
| | | 50/10/35/4.5/0.5 |
| | | Lipid:siRNA: 11:1 |
| LNP16 | MC3 | MC3/DSPC/ |
| | | Chol/PEG-DMG |
| | | 50/10/38.5/1.5 |
| | | Lipid:siRNA: 7:1 |
| LNP17 | MC3 | MC3/DSPC/ |
| | | Chol/PEG-DSG |
| | | 50/10/38.5/1.5 |
| | | Lipid:siRNA: 10:1 |
| LNP18 | MC3 | MC3/DSPC/ |
| | | Chol/PEG-DMG |
| | | 50/10/38.5/1.5 |
| | | Lipid:siRNA: 12:1 |
| LNP19 | MC3 | MC3/DSPC/ |
| | | Chol/PEG-DMG |
| | | 50/10/35/5 |
| | | Lipid:siRNA: 8:1 |
| LNP20 | MC3 | MC3/DSPC/ |
| | | Chol/PEG-DPG |
| | | 50/10/38.5/1.5 |
| | | Lipid:siRNA: 10:1 |
| LNP21 | C12-200 | C12-200/DSPC/ |
| | | Chol/PEG-DSG |
| | | 50/10/38.5/1.5 |
| | | Lipid:siRNA: 7:1 |
| LNP22 | XTC | XTC/DSPC/ |
| | | Chol/PEG-DSG |
| | | 50/10/38.5/1.5 |
| | | Lipid:siRNA: 10:1 |

DSPC: distearoylphosphatidylcholine
DPPC: dipalmitoylphosphatidylcholine
PEG-DMG: PEG-didimyristoyl glycerol (C14-PEG, or PEG-C14) (PEG with avg mol wt of 2000)
PEG-DSG: PEG-distyryl glycerol (C18-PEG, or PEG-C18) (PEG with avg mol wt of 2000)
PEG-cDMA: PEG-carbamoyl-1,2-dimyristyloxypropylamine (PEG with avg mol wt of 2000)

[0223] SNALP (1,2-Dilinolenyloxy-N,N-dimethylaminopropane (DLinDMA)) comprising formulations are described in International Publication No. WO2009/127060, filed Apr. 15, 2009, which is hereby incorporated by reference.

[0224] XTC comprising formulations are described, e.g., in U.S. Provisional Ser. No. 61/239,686, filed Sep. 3, 2009, which is hereby incorporated by reference.

[0225] MC3 comprising formulations are described, e.g., in U.S. Provisional Ser. No. 61/244,834, filed Sep. 22, 2009, U.S. Provisional Ser. No. 61/185,800, filed Jun. 10, 2009, and International Application No. PCT/US2010/28224, filed Jun. 10, 2010 which are hereby incorporated by reference in their entireties.

[0226] ALNY-100 comprising formulations are described, e.g., International patent application number PCT/US09/63933, filed on Nov. 10, 2009, which is hereby incorporated by reference.

[0227] C12-200 comprising formulations are described in U.S. Provisional Ser. No. 61/175,770, filed May 5, 2009, and International Application No. PCT/US2010/33777, filed May 5, 2010, which are hereby incorporated by reference in their entireties.

### Synthesis of Cationic Lipids.

[0228] Any of the compounds, e.g., cationic lipids and the like, used in the nucleic acid-lipid particles of the invention can be prepared by known organic synthesis techniques, including the methods described in more detail in the Examples. All substituents are as defined below unless indicated otherwise.

[0229] “Alkyl” means a straight chain or branched, noncyclic or cyclic, saturated aliphatic hydrocarbon containing from 1 to 24 carbon atoms. Representative saturated straight chain alkyls include methyl, ethyl, n-propyl, n-butyl, n-pentyl, n-hexyl, and the like; while saturated branched alkyls include isopropyl, sec-butyl, isobutyl, tert-butyl, isopentyl, and the like. Representative saturated cyclic alkyls include cyclopropyl, cyclobutyl, cyclopentyl, cyclohexyl, and the like; while unsaturated cyclic alkyls include cyclopentenyl and cyclohexenyl, and the like.

[0230] “Alkenyl” means an alkyl, as defined above, containing at least one double bond between adjacent carbon atoms. Alkenyls include both cis and trans isomers. Representative straight chain and branched alkenyls include ethylenyl, propylenyl, 1-butenyl, 2-butenyl, isobutylenyl, 1-pentenyl, 2-pentenyl, 3-methyl-1-butenyl, 2-methyl-2-butenyl, 2,3-dimethyl-2-butenyl, and the like.

[0231] “Alkynyl” means any alkyl or alkenyl, as defined above, which additionally contains at least one triple bond between adjacent carbons. Representative straight chain and branched alkynyls include acetylenyl, propynyl, 1-butynyl, 2-butynyl, 1-pentynyl, 2-pentynyl, 3-methyl-1 butynyl, and the like.

[0232] “Acyl” means any alkyl, alkenyl, or alkynyl wherein the carbon at the point of attachment is substituted with an oxo group, as defined below. For example, —C(═O)alkyl, —C(═O)alkenyl, and —C(═O)alkynyl are acyl groups.

[0233] “Heterocycle” means a 5- to 7-membered monocyclic, or 7- to 10-membered bicyclic, heterocyclic ring which is either saturated, unsaturated, or aromatic, and which contains from 1 or 2 heteroatoms independently selected from nitrogen, oxygen and sulfur, and wherein the nitrogen and sulfur heteroatoms may be optionally oxidized, and the nitrogen heteroatom may be optionally quaternized, including bicyclic rings in which any of the above heterocycles are fused to a benzene ring. The heterocycle can be attached via any heteroatom or carbon atom. Heterocycles include heteroaryls as defined below. Heterocycles include morpholinyl, pyrrolidinonyl, pyrrolidinyl, piperidinyl, piperizynyl, hydantoinyl, valerolactamyl, oxiranyl, oxetanyl, tetrahydrofuranyl, tetrahydropyranyl, tetrahydropyridinyl, tetrahydroprimidinyl, tetrahydrothiophenyl, tetrahydrothiopyranyl, tetrahydropyrimidinyl, tetrahydrothiophenyl, tetrahydrothiopyranyl, and the like.

[0234] The terms “optionally substituted alkyl”, “optionally substituted alkenyl”, “optionally substituted alkynyl”, “optionally substituted acyl”, and “optionally substituted heterocycle” means that, when substituted, at least one hydrogen atom is replaced with a substituent. In the case of an oxo substituent (=O) two hydrogen atoms are replaced. In this regard, substituents include oxo, halogen, heterocycle, —CN, —OR^{x}, —NR^{x}R^{y}, —NR^{x}C(═O)R^{y}, —NR^{x}SO₂RY, —C(═O)R^{x}, —C(═O)OR^{x}, —C(═O)NR^{x}R^{y}, —SOₙR^{x} and —SOₙNR^{x}R^{y}, wherein n is 0, 1 or 2, R^{x} and R^{y} are the same or different and independently hydrogen, alkyl or heterocycle, and each of said alkyl and heterocycle substituents may be further substituted with one or more of oxo, halogen, —OH, —CN, alkyl, —OR^{x}, heterocycle, —NR^{x}R^{y}, —NR^{x}C(═O)R^{y}, —NR^{x}SO₂RY, —C(═O)R^{x}, —C(═O)OR^{x}, —C(═O)NR^{x}R^{y}, —SOₙR^{x} and —SOₙNR^{x}R^{y}.

[0235] “Halogen” means fluoro, chloro, bromo and iodo.

[0236] In some embodiments, the methods of the invention can require the use of protecting groups. Protecting group methodology is well known to those skilled in the art (see, for example, PROTECTIVE GROUPS IN ORGANIC SYNTHESIS, Green, T. W. et al., Wiley-Interscience, New York City, 1999). Briefly, protecting groups within the context of this invention are any group that reduces or eliminates unwanted reactivity of a functional group. A protecting group can be added to a functional group to mask its reactivity during certain reactions and then removed to reveal the original functional group. In some embodiments an “alcohol protecting group” is used. An “alcohol protecting group” is any group which decreases or eliminates unwanted reactivity of an alcohol functional group. Protecting groups can be added and removed using techniques well known in the art.

### Synthesis of Formula A

[0237] In some embodiments, nucleic acid-lipid particles of the invention are formulated using a cationic lipid of formula A:

[chemical structure]

where R1 and R2 are independently alkyl, alkenyl or alkynyl, each can be optionally substituted, and R3 and R4 are independently lower alkyl or R3 and R4 can be taken together to form an optionally substituted heterocyclic ring. In some embodiments, the cationic lipid is XTC (2,2-Dilinoleyl-4-dimethylaminoethyl-[1,3]-dioxolane). In general, the lipid of formula A above may be made by the following Reaction Schemes 1 or 2, wherein all substituents are as defined above unless indicated otherwise.

[chemical structure]

[0238] Lipid A, where R1 and R₂ are independently alkyl, alkenyl or alkynyl, each can be optionally substituted, and R₃ and R₄ are independently lower alkyl or R₃ and R₄ can be taken together to form an optionally substituted heterocyclic ring, can be prepared according to Scheme 1. Ketone 1 and bromide 2 can be purchased or prepared according to methods known to those of ordinary skill in the art. Reaction of 1 and 2 yields ketal 3. Treatment of ketal 3 with amine 4 yields lipids of formula A. The lipids of formula A can be converted to the corresponding ammonium salt with an organic salt of formula 5, where X is anion counter ion selected from halogen, hydroxide, phosphate, sulfate, or the like.

[chemical structure]

[0239] Alternatively, the ketone 1 starting material can be prepared according to Scheme 2. Grignard reagent 6 and cyanide 7 can be purchased or prepared according to methods known to those of ordinary skill in the art. Reaction of 6 and 7 yields ketone 1. Conversion of ketone 1 to the corresponding lipids of formula A is as described in Scheme 1.

### Synthesis of MC3

[0240] Preparation of DLin-M-C3-DMA (i.e., (6Z,9Z,28Z,31Z)-heptatriaconta-6,9,28,31-tetraen-19-yl 4-(dimethylamino)butanoate) was as follows. A solution of (6Z,9Z,28Z,31Z)-heptatriaconta-6,9,28,31-tetraen-19-ol (0.53 g), 4-N,N-dimethylaminobutyric acid hydrochloride (0.51 g), 4-N,N-dimethylaminopyridine (0.61 g) and 1-ethyl-3-(3-dimethylaminopropyl)carbodiimide hydrochloride (0.53 g) in dichloromethane (5 mL) was stirred at room temperature overnight. The solution was washed with dilute hydrochloric acid followed by dilute aqueous sodium bicarbonate. The organic fractions were dried over anhydrous magnesium sulphate, filtered and the solvent removed on a rotovap. The residue was passed down a silica gel column (20 g) using a 1-5% methanol/dichloromethane elution gradient. Fractions containing the purified product were combined and the solvent removed, yielding a colorless oil (0.54 g).

### Synthesis of ALNY-100

[0241] Synthesis of ketal 519 [ALNY-100]was performed using the following scheme 3:

[chemical structure]

### Synthesis of 515:

[0242] To a stirred suspension of LiAlH4 (3.74 g, 0.09852 mol) in 200 ml anhydrous THF in a two neck RBF (1 L), was added a solution of 514 (10 g, 0.04926 mol) in 70 mL of THF slowly at 0° C. under nitrogen atmosphere. After complete addition, reaction mixture was warmed to room temperature and then heated to reflux for 4 h. Progress of the reaction was monitored by TLC. After completion of reaction (by TLC) the mixture was cooled to 0° C. and quenched with careful addition of saturated Na2SO4 solution. Reaction mixture was stirred for 4 h at room temperature and filtered off. Residue was washed well with THF. The filtrate and washings were mixed and diluted with 400 mL dioxane and 26 mL conc. HCl and stirred for 20 minutes at room temperature. The volatilities were stripped off under vacuum to furnish the hydrochloride salt of 515 as a white solid. Yield: 7.12 g 1H-NMR (DMSO, 400 MHz): δ=9.34 (broad, 2H), 5.68 (s, 2H), 3.74 (m, 1H), 2.66-2.60 (m, 2H), 2.50-2.45 (m, 5H).

### Synthesis of 516:

[0243] To a stirred solution of compound 515 in 100 mL dry DCM in a 250 mL two neck RBF, was added NEt3 (37.2 mL, 0.2669 mol) and cooled to 0° C. under nitrogen atmosphere. After a slow addition of N-(benzyloxy-carbonyloxy)-succinimide (20 g, 0.08007 mol) in 50 mL dry DCM, reaction mixture was allowed to warm to room temperature. After completion of the reaction (2-3 h by TLC) mixture was washed successively with 1N HCl solution (1×100 mL) and saturated NaHCO3 solution (1×50 mL). The organic layer was then dried over anhyd. Na2SO4 and the solvent was evaporated to give crude material which was purified by silica gel column chromatography to get 516 as sticky mass. Yield: 11 g (89%). 1H-NMR (CDCl3, 400 MHz): δ=7.36-7.27 (m, 5H), 5.69 (s, 2H), 5.12 (s, 2H), 4.96 (br., 1H) 2.74 (s, 3H), 2.60 (m, 2H), 2.30-2.25 (m, 2H). LC-MS [M+H] −232.3 (96.94%).

### Synthesis of 517A and 517B:

[0244] The cyclopentene 516 (5 g, 0.02164 mol) was dissolved in a solution of 220 mL acetone and water (10:1) in a single neck 500 mL RBF and to it was added N-methyl morpholine-N-oxide (7.6 g, 0.06492 mol) followed by 4.2 mL of 7.6% solution of OsO4 (0.275 g, 0.00108 mol) in tert-butanol at room temperature. After completion of the reaction (˜3 h), the mixture was quenched with addition of solid Na2SO3 and resulting mixture was stirred for 1.5 h at room temperature. Reaction mixture was diluted with DCM (300 mL) and washed with water (2×100 mL) followed by saturated NaHCO₃ (1×50 mL) solution, water (1×30 mL) and finally with brine (lx 50 mL). Organic phase was dried over an·Na2SO4 and solvent was removed in vacuum. Silica gel column chromatographic purification of the crude material was afforded a mixture of diastereomers, which were separated by prep HPLC. Yield: −6 g crude

[0245] 517A—Peak-1 (white solid), 5.13 g (96%). 1H-NMR (DMSO, 400 MHz): δ=7.39-7.31 (m, 5H), 5.04 (s, 2H), 4.78-4.73 (m, 1H), 4.48-4.47 (d, 2H), 3.94-3.93 (m, 2H), 2.71 (s, 3H), 1.72-1.67 (m, 4H). LC-MS—[M+H] −266.3, [M+NH4+] −283.5 present, HPLC-97.86%. Stereochemistry confirmed by X-ray.

### Synthesis of 518:

[0246] Using a procedure analogous to that described for the synthesis of compound 505, compound 518 (1.2 g, 41%) was obtained as a colorless oil. 1H-NMR (CDCl3, 400 MHz): δ=7.35-7.33 (m, 4H), 7.30-7.27 (m, 1H), 5.37-5.27 (m, 8H), 5.12 (s, 2H), 4.75 (m, 1H), 4.58-4.57 (m, 2H), 2.78-2.74 (m, 7H), 2.06-2.00 (m, 8H), 1.96-1.91 (m, 2H), 1.62 (m, 4H), 1.48 (m, 2H), 1.37-1.25 (br m, 36H), 0.87 (m, 6H). HPLC-98.65%.

### General Procedure for the Synthesis of Compound 519:

[0247] A solution of compound 518 (1 eq) in hexane (15 mL) was added in a drop-wise fashion to an ice-cold solution of LAH in THF (1 μM, 2 eq). After complete addition, the mixture was heated at 40° C. over 0.5 h then cooled again on an ice bath. The mixture was carefully hydrolyzed with saturated aqueous Na2SO4 then filtered through celite and reduced to an oil. Column chromatography provided the pure 519 (1.3 g, 68%) which was obtained as a colorless oil. 13C NMR □=130.2, 130.1 (x2), 127.9 (x3), 112.3, 79.3, 64.4, 44.7, 38.3, 35.4, 31.5, 29.9 (x2), 29.7, 29.6 (x2), 29.5 (x3), 29.3 (x2), 27.2 (x3), 25.6, 24.5, 23.3, 226, 14.1; Electrospray MS (+ve): Molecular weight for C44H80NO2 (M+H)+Calc. 654.6, Found 654.6.

[0248] Formulations prepared by either the standard or extrusion-free method can be characterized in similar manners. For example, formulations are typically characterized by visual inspection. They should be whitish translucent solutions free from aggregates or sediment. Particle size and particle size distribution of lipid-nanoparticles can be measured by light scattering using, for example, a Malvern Zetasizer Nano ZS (Malvern, USA). Particles should be about 20-300 nm, such as 40-100 nm in size. The particle size distribution should be unimodal. The total dsRNA concentration in the formulation, as well as the entrapped fraction, is estimated using a dye exclusion assay. A sample of the formulated dsRNA can be incubated with an RNA-binding dye, such as Ribogreen (Molecular Probes) in the presence or absence of a formulation disrupting surfactant, e.g., 0.5% Triton-X100. The total dsRNA in the formulation can be determined by the signal from the sample containing the surfactant, relative to a standard curve. The entrapped fraction is determined by subtracting the “free” dsRNA content (as measured by the signal in the absence of surfactant) from the total dsRNA content. Percent entrapped dsRNA is typically >85%. For SNALP formulation, the particle size is at least 30 nm, at least 40 nm, at least 50 nm, at least 60 nm, at least 70 nm, at least 80 nm, at least 90 nm, at least 100 nm, at least 110 nm, and at least 120 nm. The suitable range is typically about at least 50 nm to about at least 110 nm, about at least 60 nm to about at least 100 nm, or about at least 80 nm to about at least 90 nm.

[0249] Compositions and formulations for oral administration include powders or granules, microparticulates, nanoparticulates, suspensions or solutions in water or non-aqueous media, capsules, gel capsules, sachets, tablets or minitablets. Thickeners, flavoring agents, diluents, emulsifiers, dispersing aids or binders may be desirable. In some embodiments, oral formulations are those in which dsRNAs featured in the invention are administered in conjunction with one or more penetration enhancers surfactants and chelators. Suitable surfactants include fatty acids and/or esters or salts thereof, bile acids and/or salts thereof. Suitable bile acids/salts include chenodeoxycholic acid (CDCA) and ursodeoxychenodeoxycholic acid (UDCA), cholic acid, dehydrocholic acid, deoxycholic acid, glucholic acid, glycholic acid, glycodeoxycholic acid, taurocholic acid, taurodeoxycholic acid, sodium tauro-24,25-dihydro-fusidate and sodium glycodihydrofusidate. Suitable fatty acids include arachidonic acid, undecanoic acid, oleic acid, lauric acid, caprylic acid, capric acid, myristic acid, palmitic acid, stearic acid, linoleic acid, linolenic acid, dicaprate, tricaprate, monoolein, dilaurin, glyceryl 1-monocaprate, 1-dodecylazacycloheptan-2-one, an acylcarnitine, an acylcholine, or a monoglyceride, a diglyceride or a pharmaceutically acceptable salt thereof (e.g., sodium). In some embodiments, combinations of penetration enhancers are used, for example, fatty acids/salts in combination with bile acids/salts. One exemplary combination is the sodium salt of lauric acid, capric acid and UDCA. Further penetration enhancers include polyoxyethylene-9-lauryl ether, polyoxyethylene-20-cetyl ether. DsRNAs featured in the invention may be delivered orally, in granular form including sprayed dried particles, or complexed to form micro or nanoparticles. DsRNA complexing agents include poly-amino acids; polyimines; polyacrylates; polyalkylacrylates, polyoxethanes, polyalkylcyanoacrylates; cationized gelatins, albumins, starches, acrylates, polyethyleneglycols (PEG) and starches; polyalkylcyanoacrylates; DEAE-derivatized polyimines, pollulans, celluloses and starches. Suitable complexing agents include chitosan, N-trimethylchitosan, poly-L-lysine, polyhistidine, polyornithine, polyspermines, protamine, polyvinylpyridine, polythiodiethylaminomethylethylene P(TDAE), polyaminostyrene (e.g., p-amino), poly(methylcyanoacrylate), poly(ethylcyanoacrylate), poly(butylcyanoacrylate), poly(isobutylcyanoacrylate), poly(isohexylcynaoacrylate), DEAE-methacrylate, DEAE-hexylacrylate, DEAE-acrylamide, DEAE-albumin and DEAE-dextran, polymethylacrylate, polyhexylacrylate, poly(D,L-lactic acid), poly(DL-lactic-co-glycolic acid (PLGA), alginate, and polyethyleneglycol (PEG). Oral formulations for dsRNAs and their preparation are described in detail in U.S. Pat. No. 6,887,906, US Publn. No. 20030027780, and U.S. Pat. No. 6,747,014, each of which is incorporated herein by reference.

[0250] Compositions and formulations for parenteral, intraparenchymal (into the brain), intrathecal, intraventricular or intrahepatic administration may include sterile aqueous solutions which may also contain buffers, diluents and other suitable additives such as, but not limited to, penetration enhancers, carrier compounds and other pharmaceutically acceptable carriers or excipients.

[0251] Pharmaceutical compositions of the present invention include, but are not limited to, solutions, emulsions, and liposome-containing formulations. These compositions may be generated from a variety of components that include, but are not limited to, preformed liquids, self-emulsifying solids and self-emulsifying semisolids. Particularly preferred are formulations that target the liver when treating hepatic disorders such as hepatic carcinoma.

[0252] The pharmaceutical formulations of the present invention, which may conveniently be presented in unit dosage form, may be prepared according to conventional techniques well known in the pharmaceutical industry. Such techniques include the step of bringing into association the active ingredients with the pharmaceutical carrier(s) or excipient(s). In general, the formulations are prepared by uniformly and intimately bringing into association the active ingredients with liquid carriers or finely divided solid carriers or both, and then, if necessary, shaping the product.

[0253] The compositions of the present invention may be formulated into any of many possible dosage forms such as, but not limited to, tablets, capsules, gel capsules, liquid syrups, soft gels, suppositories, and enemas. The compositions of the present invention may also be formulated as suspensions in aqueous, non-aqueous or mixed media. Aqueous suspensions may further contain substances which increase the viscosity of the suspension including, for example, sodium carboxymethylcellulose, sorbitol and/or dextran. The suspension may also contain stabilizers.

### Additional Formulations

### Emulsions

[0254] The compositions of the present invention can be prepared and formulated as emulsions. Emulsions are typically heterogeneous systems of one liquid dispersed in another in the form of droplets usually exceeding 0.1 m in diameter (see e.g., Ansel's Pharmaceutical Dosage Forms and Drug Delivery Systems, Allen, LV., Popovich NG., and Ansel HC., 2004, Lippincott Williams & Wilkins (8th ed.), New York, NY; Idson, in Pharmaceutical Dosage Forms, Lieberman, Rieger and Banker (Eds.), 1988, Marcel Dekker, Inc., New York, N.Y., volume 1, p. 199; Rosoff, in Pharmaceutical Dosage Forms, Lieberman, Rieger and Banker (Eds.), 1988, Marcel Dekker, Inc., New York, N.Y., Volume 1, p. 245; Block in Pharmaceutical Dosage Forms, Lieberman, Rieger and Banker (Eds.), 1988, Marcel Dekker, Inc., New York, N.Y., volume 2, p. 335; Higuchi et al., in Remington's Pharmaceutical Sciences, Mack Publishing Co., Easton, Pa., 1985, p. 301). Emulsions are often biphasic systems comprising two immiscible liquid phases intimately mixed and dispersed with each other. In general, emulsions may be of either the water-in-oil (w/o) or the oil-in-water (o/w) variety. When an aqueous phase is finely divided into and dispersed as minute droplets into a bulk oily phase, the resulting composition is called a water-in-oil (w/o) emulsion. Alternatively, when an oily phase is finely divided into and dispersed as minute droplets into a bulk aqueous phase, the resulting composition is called an oil-in-water (o/w) emulsion. Emulsions may contain additional components in addition to the dispersed phases, and the active drug which may be present as a solution in either the aqueous phase, oily phase or itself as a separate phase. Pharmaceutical excipients such as emulsifiers, stabilizers, dyes, and anti-oxidants may also be present in emulsions as needed. Pharmaceutical emulsions may also be multiple emulsions that are comprised of more than two phases such as, for example, in the case of oil-in-water-in-oil (o/w/o) and water-in-oil-in-water (w/o/w) emulsions. Such complex formulations often provide certain advantages that simple binary emulsions do not. Multiple emulsions in which individual oil droplets of an o/w emulsion enclose small water droplets constitute a w/o/w emulsion. Likewise a system of oil droplets enclosed in globules of water stabilized in an oily continuous phase provides an o/w/o emulsion.

[0255] Emulsions are characterized by little or no thermodynamic stability. Often, the dispersed or discontinuous phase of the emulsion is well dispersed into the external or continuous phase and maintained in this form through the means of emulsifiers or the viscosity of the formulation. Either of the phases of the emulsion may be a semisolid or a solid, as is the case of emulsion-style ointment bases and creams. Other means of stabilizing emulsions entail the use of emulsifiers that may be incorporated into either phase of the emulsion. Emulsifiers may broadly be classified into four categories: synthetic surfactants, naturally occurring emulsifiers, absorption bases, and finely dispersed solids (see e.g., Ansel's Pharmaceutical Dosage Forms and Drug Delivery Systems, Allen, L V., Popovich N G., and Ansel H C., 2004, Lippincott Williams & Wilkins (8th ed.), New York, NY; Idson, in Pharmaceutical Dosage Forms, Lieberman, Rieger and Banker (Eds.), 1988, Marcel Dekker, Inc., New York, N.Y., volume 1, p. 199).

[0256] Synthetic surfactants, also known as surface active agents, have found wide applicability in the formulation of emulsions and have been reviewed in the literature (see e.g., Ansel's Pharmaceutical Dosage Forms and Drug Delivery Systems, Allen, L V., Popovich N G., and Ansel H C., 2004, Lippincott Williams & Wilkins (8th ed.), New York, NY; Rieger, in Pharmaceutical Dosage Forms, Lieberman, Rieger and Banker (Eds.), 1988, Marcel Dekker, Inc., New York, N.Y., volume 1, p. 285; Idson, in Pharmaceutical Dosage Forms, Lieberman, Rieger and Banker (Eds.), Marcel Dekker, Inc., New York, N.Y., 1988, volume 1, p. 199). Surfactants are typically amphiphilic and comprise a hydrophilic and a hydrophobic portion. The ratio of the hydrophilic to the hydrophobic nature of the surfactant has been termed the hydrophile/lipophile balance (HLB) and is a valuable tool in categorizing and selecting surfactants in the preparation of formulations. Surfactants may be classified into different classes based on the nature of the hydrophilic group: nonionic, anionic, cationic and amphoteric (see e.g., Ansel's Pharmaceutical Dosage Forms and Drug Delivery Systems, Allen, L V., Popovich N G., and Ansel H C., 2004, Lippincott Williams & Wilkins (8th ed.), New York, NY Rieger, in Pharmaceutical Dosage Forms, Lieberman, Rieger and Banker (Eds.), 1988, Marcel Dekker, Inc., New York, N.Y., volume 1, p. 285).

[0257] Naturally occurring emulsifiers used in emulsion formulations include lanolin, beeswax, phosphatides, lecithin and acacia. Absorption bases possess hydrophilic properties such that they can soak up water to form w/o emulsions yet retain their semisolid consistencies, such as anhydrous lanolin and hydrophilic petrolatum. Finely divided solids have also been used as good emulsifiers especially in combination with surfactants and in viscous preparations. These include polar inorganic solids, such as heavy metal hydroxides, nonswelling clays such as bentonite, attapulgite, hectorite, kaolin, montmorillonite, colloidal aluminum silicate and colloidal magnesium aluminum silicate, pigments and nonpolar solids such as carbon or glyceryl tristearate.

[0258] A large variety of non-emulsifying materials are also included in emulsion formulations and contribute to the properties of emulsions. These include fats, oils, waxes, fatty acids, fatty alcohols, fatty esters, humectants, hydrophilic colloids, preservatives and antioxidants (Block, in Pharmaceutical Dosage Forms, Lieberman, Rieger and Banker (Eds.), 1988, Marcel Dekker, Inc., New York, N.Y., volume 1, p. 335; Idson, in Pharmaceutical Dosage Forms, Lieberman, Rieger and Banker (Eds.), 1988, Marcel Dekker, Inc., New York, N.Y., volume 1, p. 199).

[0259] Hydrophilic colloids or hydrocolloids include naturally occurring gums and synthetic polymers such as polysaccharides (for example, acacia, agar, alginic acid, carrageenan, guar gum, karaya gum, and tragacanth), cellulose derivatives (for example, carboxymethylcellulose and carboxypropylcellulose), and synthetic polymers (for example, carbomers, cellulose ethers, and carboxyvinyl polymers). These disperse or swell in water to form colloidal solutions that stabilize emulsions by forming strong interfacial films around the dispersed-phase droplets and by increasing the viscosity of the external phase.

[0260] Since emulsions often contain a number of ingredients such as carbohydrates, proteins, sterols and phosphatides that may readily support the growth of microbes, these formulations often incorporate preservatives. Commonly used preservatives included in emulsion formulations include methyl paraben, propyl paraben, quaternary ammonium salts, benzalkonium chloride, esters of p-hydroxybenzoic acid, and boric acid. Antioxidants are also commonly added to emulsion formulations to prevent deterioration of the formulation. Antioxidants used may be free radical scavengers such as tocopherols, alkyl gallates, butylated hydroxyanisole, butylated hydroxytoluene, or reducing agents such as ascorbic acid and sodium metabisulfite, and antioxidant synergists such as citric acid, tartaric acid, and lecithin.

[0261] The application of emulsion formulations via dermatological, oral and parenteral routes and methods for their manufacture have been reviewed in the literature (see e.g., Ansel's Pharmaceutical Dosage Forms and Drug Delivery Systems, Allen, L V., Popovich N G., and Ansel H C., 2004, Lippincott Williams & Wilkins (8th ed.), New York, NY; Idson, in Pharmaceutical Dosage Forms, Lieberman, Rieger and Banker (Eds.), 1988, Marcel Dekker, Inc., New York, N.Y., volume 1, p. 199). Emulsion formulations for oral delivery have been very widely used because of ease of formulation, as well as efficacy from an absorption and bioavailability standpoint (see e.g., Ansel's Pharmaceutical Dosage Forms and Drug Delivery Systems, Allen, L V., Popovich N G., and Ansel H C., 2004, Lippincott Williams & Wilkins (8th ed.), New York, NY; Rosoff, in Pharmaceutical Dosage Forms, Lieberman, Rieger and Banker (Eds.), 1988, Marcel Dekker, Inc., New York, N.Y., volume 1, p. 245; Idson, in Pharmaceutical Dosage Forms, Lieberman, Rieger and Banker (Eds.), 1988, Marcel Dekker, Inc., New York, N.Y., volume 1, p. 199). Mineral-oil base laxatives, oil-soluble vitamins and high fat nutritive preparations are among the materials that have commonly been administered orally as o/w emulsions.

[0262] In one embodiment of the present invention, the compositions of iRNAs and nucleic acids are formulated as microemulsions. A microemulsion may be defined as a system of water, oil and amphiphile which is a single optically isotropic and thermodynamically stable liquid solution (see e.g., Ansel's Pharmaceutical Dosage Forms and Drug Delivery Systems, Allen, L V., Popovich N G., and Ansel H C., 2004, Lippincott Williams & Wilkins (8th ed.), New York, NY; Rosoff, in Pharmaceutical Dosage Forms, Lieberman, Rieger and Banker (Eds.), 1988, Marcel Dekker, Inc., New York, N.Y., volume 1, p. 245). Typically microemulsions are systems that are prepared by first dispersing an oil in an aqueous surfactant solution and then adding a sufficient amount of a fourth component, generally an intermediate chain-length alcohol to form a transparent system. Therefore, microemulsions have also been described as thermodynamically stable, isotropically clear dispersions of two immiscible liquids that are stabilized by interfacial films of surface-active molecules (Leung and Shah, in: Controlled Release of Drugs: Polymers and Aggregate Systems, Rosoff, M., Ed., 1989, VCH Publishers, New York, pages 185-215). Microemulsions commonly are prepared via a combination of three to five components that include oil, water, surfactant, cosurfactant and electrolyte. Whether the microemulsion is of the water-in-oil (w/o) or an oil-in-water (o/w) type is dependent on the properties of the oil and surfactant used and on the structure and geometric packing of the polar heads and hydrocarbon tails of the surfactant molecules (Schott, in Remington's Pharmaceutical Sciences, Mack Publishing Co., Easton, Pa., 1985, p. 271).

[0263] The phenomenological approach utilizing phase diagrams has been extensively studied and has yielded a comprehensive knowledge, to one skilled in the art, of how to formulate microemulsions (see e.g., Ansel's Pharmaceutical Dosage Forms and Drug Delivery Systems, Allen, L V., Popovich N G., and Ansel H C., 2004, Lippincott Williams & Wilkins (8th ed.), New York, NY; Rosoff, in Pharmaceutical Dosage Forms, Lieberman, Rieger and Banker (Eds.), 1988, Marcel Dekker, Inc., New York, N.Y., volume 1, p. 245; Block, in Pharmaceutical Dosage Forms, Lieberman, Rieger and Banker (Eds.), 1988, Marcel Dekker, Inc., New York, N.Y., volume 1, p. 335). Compared to conventional emulsions, microemulsions offer the advantage of solubilizing water-insoluble drugs in a formulation of thermodynamically stable droplets that are formed spontaneously.

[0264] Surfactants used in the preparation of microemulsions include, but are not limited to, ionic surfactants, non-ionic surfactants, Brij 96, polyoxyethylene oleyl ethers, polyglycerol fatty acid esters, tetraglycerol monolaurate (ML310), tetraglycerol monooleate (M0310), hexaglycerol monooleate (P0310), hexaglycerol pentaoleate (P0500), decaglycerol monocaprate (MCA750), decaglycerol monooleate (M0750), decaglycerol sequioleate (S0750), decaglycerol decaoleate (DA0750), alone or in combination with cosurfactants. The cosurfactant, usually a short-chain alcohol such as ethanol, 1-propanol, and 1-butanol, serves to increase the interfacial fluidity by penetrating into the surfactant film and consequently creating a disordered film because of the void space generated among surfactant molecules. Microemulsions may, however, be prepared without the use of cosurfactants and alcohol-free self-emulsifying microemulsion systems are known in the art. The aqueous phase may typically be, but is not limited to, water, an aqueous solution of the drug, glycerol, PEG300, PEG400, polyglycerols, propylene glycols, and derivatives of ethylene glycol. The oil phase may include, but is not limited to, materials such as Captex 300, Captex 355, Capmul MCM, fatty acid esters, medium chain (C8-C12) mono, di, and tri-glycerides, polyoxyethylated glyceryl fatty acid esters, fatty alcohols, polyglycolized glycerides, saturated polyglycolized C8-C10 glycerides, vegetable oils and silicone oil.

[0265] Microemulsions are particularly of interest from the standpoint of drug solubilization and the enhanced absorption of drugs. Lipid based microemulsions (both o/w and w/o) have been proposed to enhance the oral bioavailability of drugs, including peptides (see e.g., U.S. Pat. Nos. 6,191,105; 7,063,860; 7,070,802; 7,157,099; Constantinides et al., Pharmaceutical Research, 1994, 11, 1385-1390; Ritschel, Meth. Find. Exp. Clin. Pharmacol., 1993, 13, 205). Microemulsions afford advantages of improved drug solubilization, protection of drug from enzymatic hydrolysis, possible enhancement of drug absorption due to surfactant-induced alterations in membrane fluidity and permeability, ease of preparation, ease of oral administration over solid dosage forms, improved clinical potency, and decreased toxicity (see e.g., U.S. Pat. Nos. 6,191,105; 7,063,860; 7,070,802; 7,157,099; Constantinides et al., Pharmaceutical Research, 1994, 11, 1385; Ho et al., J. Pharm. Sci., 1996, 85, 138-143). Often microemulsions may form spontaneously when their components are brought together at ambient temperature. This may be particularly advantageous when formulating thermolabile drugs, peptides or iRNAs. Microemulsions have also been effective in the transdermal delivery of active components in both cosmetic and pharmaceutical applications. It is expected that the microemulsion compositions and formulations of the present invention will facilitate the increased systemic absorption of iRNAs and nucleic acids from the gastrointestinal tract, as well as improve the local cellular uptake of iRNAs and nucleic acids.

[0266] Microemulsions of the present invention may also contain additional components and additives such as sorbitan monostearate (Grill 3), Labrasol, and penetration enhancers to improve the properties of the formulation and to enhance the absorption of the iRNAs and nucleic acids of the present invention. Penetration enhancers used in the microemulsions of the present invention may be classified as belonging to one of five broad categories—surfactants, fatty acids, bile salts, chelating agents, and non-chelating non-surfactants (Lee et al., Critical Reviews in Therapeutic Drug Carrier Systems, 1991, p. 92). Each of these classes has been discussed above.

### Penetration Enhancers

[0267] In one embodiment, the present invention employs various penetration enhancers to effect the efficient delivery of nucleic acids, particularly iRNAs, to the skin of animals. Most drugs are present in solution in both ionized and nonionized forms. However, usually only lipid soluble or lipophilic drugs readily cross cell membranes. It has been discovered that even non-lipophilic drugs may cross cell membranes if the membrane to be crossed is treated with a penetration enhancer. In addition to aiding the diffusion of non-lipophilic drugs across cell membranes, penetration enhancers also enhance the permeability of lipophilic drugs.

[0268] Penetration enhancers may be classified as belonging to one of five broad categories, i.e., surfactants, fatty acids, bile salts, chelating agents, and non-chelating non-surfactants (see e.g., Malmsten, M. Surfactants and polymers in drug delivery, Informa Health Care, New York, NY, 2002; Lee et al., Critical Reviews in Therapeutic Drug Carrier Systems, 1991, p.92). Each of the above mentioned classes of penetration enhancers are described below in greater detail.

### Surfactants:

[0269] In connection with the present invention, surfactants (or “surface-active agents”) are chemical entities which, when dissolved in an aqueous solution, reduce the surface tension of the solution or the interfacial tension between the aqueous solution and another liquid, with the result that absorption of iRNAs through the mucosa is enhanced. In addition to bile salts and fatty acids, these penetration enhancers include, for example, sodium lauryl sulfate, polyoxyethylene-9-lauryl ether and polyoxyethylene-20-cetyl ether) (see e.g., Malmsten, M. Surfactants and polymers in drug delivery, Informa Health Care, New York, NY, 2002; Lee et al., Critical Reviews in Therapeutic Drug Carrier Systems, 1991, p.92); and perfluorochemical emulsions, such as FC-43. Takahashi et al., J. Pharm. Pharmacol., 1988, 40, 252).

### Fatty Acids:

[0270] Various fatty acids and their derivatives which act as penetration enhancers include, for example, oleic acid, lauric acid, capric acid (n-decanoic acid), myristic acid, palmitic acid, stearic acid, linoleic acid, linolenic acid, dicaprate, tricaprate, monoolein (1-monooleoyl-rac-glycerol), dilaurin, caprylic acid, arachidonic acid, glycerol 1-monocaprate, 1-dodecylazacycloheptan-2-one, acylcarnitines, acylcholines, C₁₂o alkyl esters thereof (e.g., methyl, isopropyl and t-butyl), and mono- and di-glycerides thereof (i.e., oleate, laurate, caprate, myristate, palmitate, stearate, linoleate, etc.) (see e.g., Touitou, E., et al. Enhancement in Drug Delivery, CRC Press, Danvers, MA, 2006; Lee et al., Critical Reviews in Therapeutic Drug Carrier Systems, 1991, p.92; Muranishi, Critical Reviews in Therapeutic Drug Carrier Systems, 1990, 7, 1-33; El Hariri et al., J. Pharm. Pharmacol., 1992, 44, 651-654).

### Bile Salts:

[0271] The physiological role of bile includes the facilitation of dispersion and absorption of lipids and fat-soluble vitamins (see e.g., Malmsten, M. Surfactants and polymers in drug delivery, Informa Health Care, New York, NY, 2002; Brunton, Chapter 38 in: Goodman & Gilman's The Pharmacological Basis of Therapeutics, 9th Ed., Hardman et al. Eds., McGraw-Hill, New York, 1996, pp. 934-935). Various natural bile salts, and their synthetic derivatives, act as penetration enhancers. Thus the term “bile salts” includes any of the naturally occurring components of bile as well as any of their synthetic derivatives. Suitable bile salts include, for example, cholic acid (or its pharmaceutically acceptable sodium salt, sodium cholate), dehydrocholic acid (sodium dehydrocholate), deoxycholic acid (sodium deoxycholate), glucholic acid (sodium glucholate), glycholic acid (sodium glycocholate), glycodeoxycholic acid (sodium glycodeoxycholate), taurocholic acid (sodium taurocholate), taurodeoxycholic acid (sodium taurodeoxycholate), chenodeoxycholic acid (sodium chenodeoxycholate), ursodeoxycholic acid (UDCA), sodium tauro-24,25-dihydro-fusidate (STDHF), sodium glycodihydrofusidate and polyoxyethylene-9-lauryl ether (POE) (see e.g., Malmsten, M. Surfactants and polymers in drug delivery, Informa Health Care, New York, NY, 2002; Lee et al., Critical Reviews in Therapeutic Drug Carrier Systems, 1991, page 92; Swinyard, Chapter 39 In: Remington's Pharmaceutical Sciences, 18th Ed., Gennaro, ed., Mack Publishing Co., Easton, Pa., 1990, pages 782-783; Muranishi, Critical Reviews in Therapeutic Drug Carrier Systems, 1990, 7, 1-33; Yamamoto et al., J. Pharm. Exp. Ther., 1992, 263, 25; Yamashita et al., J. Pharm. Sci., 1990, 79, 579-583).

### Chelating Agents:

[0272] Chelating agents, as used in connection with the present invention, can be defined as compounds that remove metallic ions from solution by forming complexes therewith, with the result that absorption of iRNAs through the mucosa is enhanced. With regards to their use as penetration enhancers in the present invention, chelating agents have the added advantage of also serving as DNase inhibitors, as most characterized DNA nucleases require a divalent metal ion for catalysis and are thus inhibited by chelating agents (Jarrett, J. Chromatogr., 1993, 618, 315-339). Suitable chelating agents include but are not limited to disodium ethylenediaminetetraacetate (EDTA), citric acid, salicylates (e.g., sodium salicylate, 5-methoxysalicylate and homovanilate), N-acyl derivatives of collagen, laureth-9 and N-amino acyl derivatives of beta-diketones (enamines)(see e.g., Katdare, A. et al., Excipient development for pharmaceutical, biotechnology, and drug delivery, CRC Press, Danvers, MA, 2006; Lee et al., Critical Reviews in Therapeutic Drug Carrier Systems, 1991, page 92; Muranishi, Critical Reviews in Therapeutic Drug Carrier Systems, 1990, 7, 1-33; Buur et al., J. Control Rel., 1990, 14, 43-51).

### Non-Chelating Non-Surfactants:

[0273] As used herein, non-chelating non-surfactant penetration enhancing compounds can be defined as compounds that demonstrate insignificant activity as chelating agents or as surfactants but that nonetheless enhance absorption of iRNAs through the alimentary mucosa (see e.g., Muranishi, Critical Reviews in Therapeutic Drug Carrier Systems, 1990, 7, 1-33). This class of penetration enhancers includes, for example, unsaturated cyclic ureas, 1-alkyl- and 1-alkenylazacyclo-alkanone derivatives (Lee et al., Critical Reviews in Therapeutic Drug Carrier Systems, 1991, page 92); and non-steroidal anti-inflammatory agents such as diclofenac sodium, indomethacin and phenylbutazone (Yamashita et al., J. Pharm. Pharmacol., 1987, 39, 621-626).

[0274] Agents that enhance uptake of iRNAs at the cellular level may also be added to the pharmaceutical and other compositions of the present invention. For example, cationic lipids, such as lipofectin (Junichi et al, U.S. Pat. No. 5,705,188), cationic glycerol derivatives, and polycationic molecules, such as polylysine (Lollo et al., PCT Application WO 97/30731), are also known to enhance the cellular uptake of dsRNAs. Examples of commercially available transfection reagents include, for example Lipofectamine™ (Invitrogen; Carlsbad, CA), Lipofectamine 2000™ (Invitrogen; Carlsbad, CA), 293fectin™ (Invitrogen; Carlsbad, CA), Cellfectin™ (Invitrogen; Carlsbad, CA), DMRIE-C™ (Invitrogen; Carlsbad, CA), FreeStyle™ MAX (Invitrogen; Carlsbad, CA), Lipofectamine™ 2000 CD (Invitrogen; Carlsbad, CA), Lipofectamine™ (Invitrogen; Carlsbad, CA), RNAiMAX (Invitrogen; Carlsbad, CA), Oligofectamine™ (Invitrogen; Carlsbad, CA), Optifect™ (Invitrogen; Carlsbad, CA), X-tremeGENE Q2 Transfection Reagent (Roche; Grenzacherstrasse, Switzerland), DOTAP Liposomal Transfection Reagent (Grenzacherstrasse, Switzerland), DOSPER Liposomal Transfection Reagent (Grenzacherstrasse, Switzerland), or Fugene (Grenzacherstrasse, Switzerland), Transfectam® Reagent (Promega; Madison, WI), TransFast™ Transfection Reagent (Promega; Madison, WI), Tfx™-20 Reagent (Promega; Madison, WI), Tfx™-50 Reagent (Promega; Madison, WI), DreamFect™ (OZ Biosciences; Marseille, France), EcoTransfect (OZ Biosciences; Marseille, France), TransPass^{a} D1 Transfection Reagent (New England Biolabs; Ipswich, MA, USA), LyoVec™/LipoGen™ (Invivogen; San Diego, CA, USA), PerFectin Transfection Reagent (Genlantis; San Diego, CA, USA), NeuroPORTER Transfection Reagent (Genlantis; San Diego, CA, USA), GenePORTER Transfection reagent (Genlantis; San Diego, CA, USA), GenePORTER 2 Transfection reagent (Genlantis; San Diego, CA, USA), Cytofectin Transfection Reagent (Genlantis; San Diego, CA, USA), BaculoPORTER Transfection Reagent (Genlantis; San Diego, CA, USA), TroganPORTER™ transfection Reagent (Genlantis; San Diego, CA, USA), RiboFect (Bioline; Taunton, MA, USA), PlasFect (Bioline; Taunton, MA, USA), UniFECTOR (B-Bridge International; Mountain View, CA, USA), SureFECTOR (B-Bridge International; Mountain View, CA, USA), or HiFect™ (B-Bridge International, Mountain View, CA, USA), among others.

[0275] Other agents may be utilized to enhance the penetration of the administered nucleic acids, including glycols such as ethylene glycol and propylene glycol, pyrrols such as 2-pyrrol, azones, and terpenes such as limonene and menthone.

### Carriers

[0276] Certain compositions of the present invention also incorporate carrier compounds in the formulation. As used herein, “carrier compound” or “carrier” can refer to a nucleic acid, or analog thereof, which is inert (i.e., does not possess biological activity per se) but is recognized as a nucleic acid by in vivo processes that reduce the bioavailability of a nucleic acid having biological activity by, for example, degrading the biologically active nucleic acid or promoting its removal from circulation. The coadministration of a nucleic acid and a carrier compound, typically with an excess of the latter substance, can result in a substantial reduction of the amount of nucleic acid recovered in the liver, kidney or other extracirculatory reservoirs, presumably due to competition between the carrier compound and the nucleic acid for a common receptor. For example, the recovery of a partially phosphorothioate dsRNA in hepatic tissue can be reduced when it is coadministered with polyinosinic acid, dextran sulfate, polycytidic acid or 4-acetamido-4′isothiocyano-stilbene-2,2′-disulfonic acid (Miyao et al., DsRNA Res. Dev., 1995, 5, 115-121; Takakura et al., DsRNA & Nucl. Acid Drug Dev., 1996, 6, 177-183.

### Excipients

[0277] In contrast to a carrier compound, a “pharmaceutical carrier” or “excipient” is a pharmaceutically acceptable solvent, suspending agent or any other pharmacologically inert vehicle for delivering one or more nucleic acids to an animal. The excipient may be liquid or solid and is selected, with the planned manner of administration in mind, so as to provide for the desired bulk, consistency, etc., when combined with a nucleic acid and the other components of a given pharmaceutical composition. Typical pharmaceutical carriers include, but are not limited to, binding agents (e.g., pregelatinized maize starch, polyvinylpyrrolidone or hydroxypropyl methylcellulose, etc.); fillers (e.g., lactose and other sugars, microcrystalline cellulose, pectin, gelatin, calcium sulfate, ethyl cellulose, polyacrylates or calcium hydrogen phosphate, etc.); lubricants (e.g., magnesium stearate, talc, silica, colloidal silicon dioxide, stearic acid, metallic stearates, hydrogenated vegetable oils, corn starch, polyethylene glycols, sodium benzoate, sodium acetate, etc.); disintegrants (e.g., starch, sodium starch glycolate, etc.); and wetting agents (e.g., sodium lauryl sulphate, etc).

[0278] Pharmaceutically acceptable organic or inorganic excipients suitable for non-parenteral administration which do not deleteriously react with nucleic acids can also be used to formulate the compositions of the present invention. Suitable pharmaceutically acceptable carriers include, but are not limited to, water, salt solutions, alcohols, polyethylene glycols, gelatin, lactose, amylose, magnesium stearate, talc, silicic acid, viscous paraffin, hydroxymethylcellulose, polyvinylpyrrolidone and the like.

[0279] Formulations for topical administration of nucleic acids may include sterile and non-sterile aqueous solutions, non-aqueous solutions in common solvents such as alcohols, or solutions of the nucleic acids in liquid or solid oil bases. The solutions may also contain buffers, diluents and other suitable additives. Pharmaceutically acceptable organic or inorganic excipients suitable for non-parenteral administration which do not deleteriously react with nucleic acids can be used.

[0280] Suitable pharmaceutically acceptable excipients include, but are not limited to, water, salt solutions, alcohol, polyethylene glycols, gelatin, lactose, amylose, magnesium stearate, talc, silicic acid, viscous paraffin, hydroxymethylcellulose, polyvinylpyrrolidone and the like.

### Other Components

[0281] The compositions of the present invention can additionally contain other adjunct components conventionally found in pharmaceutical compositions, at their art-established usage levels. Thus, for example, the compositions may contain additional, compatible, pharmaceutically-active materials such as, for example, antipruritics, astringents, local anesthetics or anti-inflammatory agents, or may contain additional materials useful in physically formulating various dosage forms of the compositions of the present invention, such as dyes, flavoring agents, preservatives, antioxidants, opacifiers, thickening agents and stabilizers. However, such materials, when added, should not unduly interfere with the biological activities of the components of the compositions of the present invention. The formulations can be sterilized and, if desired, mixed with auxiliary agents, e.g., lubricants, preservatives, stabilizers, wetting agents, emulsifiers, salts for influencing osmotic pressure, buffers, colorings, flavorings and/or aromatic substances and the like which do not deleteriously interact with the nucleic acid(s) of the formulation.

[0282] Aqueous suspensions can contain substances that increase the viscosity of the suspension including, for example, sodium carboxymethylcellulose, sorbitol and/or dextran. The suspension may also contain stabilizers.

[0283] In some embodiments, pharmaceutical compositions featured in the invention include (a) one or more iRNA compounds and (b) one or more biologic agents which function by a non-RNAi mechanism. Examples of such biologics include, biologics that target one or more of PD-1, PD-L1, or B7-H1 (CD80) (e.g., monoclonal antibodies against PD-1, PD-L1, or B7-H1), or one or more recombinant cytokines (e.g., IL6, IFN-γ, and TNF).

[0284] Toxicity and therapeutic efficacy of such compounds can be determined by standard pharmaceutical procedures in cell cultures or experimental animals, e.g., for determining the LD50 (the dose lethal to 50% of the population) and the ED50 (the dose therapeutically effective in 50% of the population). The dose ratio between toxic and therapeutic effects is the therapeutic index and it can be expressed as the ratio LD50/ED50. Compounds that exhibit high therapeutic indices are preferred.

[0285] The data obtained from cell culture assays and animal studies can be used in formulating a range of dosage for use in humans. The dosage of compositions featured herein lies generally within a range of circulating concentrations that include the ED50 with little or no toxicity. The dosage can vary within this range depending upon the dosage form employed and the route of administration utilized. For any compound used in the methods featured in the invention, the therapeutically effective dose can be estimated initially from cell culture assays. A dose can be formulated in animal models to achieve a circulating plasma concentration range of the compound or, when appropriate, of the polypeptide product of a target sequence (e.g., achieving a decreased concentration of the polypeptide) that includes the IC50 (i.e., the concentration of the test compound which achieves a half-maximal inhibition of symptoms) as determined in cell culture. Such information can be used to more accurately determine useful doses in humans. Levels in plasma may be measured, for example, by high performance liquid chromatography.

[0286] In addition to their administration, as discussed above, the iRNAs described herein can be administered in combination with other known agents effective in treatment of pathological processes mediated by CD274/PD-L1 expression. In any event, the administering physician can adjust the amount and timing of iRNA administration on the basis of results observed using standard measures of efficacy known in the art or described herein.

### Methods for Treating Diseases Caused by Expression of a CD274/PD-L1 Gene

[0287] The invention relates in particular to the use of an iRNA targeting CD274/PD-L1 and compositions containing at least one such iRNA for the treatment of a CD274/PD-L1-mediated disorder or disease. For example, a composition containing an iRNA targeting a CD274/PD-L1 gene is used for treatment of a cancer. As used herein, cancer refers to any of various malignant neoplasms characterized by the proliferation of anaplastic cells that tend to invade surrounding tissue and metastasize to new body sites and also refers to the pathological condition characterized by such malignant neoplastic growths. A cancer can be a tumor or hematological malignancy, and includes but is not limited to, all types of lymphomas/leukemias, carcinomas and sarcomas, such as those cancers or tumors found in the anus, bladder, bile duct, bone, brain, breast, cervix, colon/rectum, endometrium, esophagus, eye, gallbladder, head and neck, liver, kidney, larynx, lung, mediastinum (chest), mouth, ovaries, pancreas, penis, prostate, skin, small intestine, stomach, spinal marrow, tailbone, testicles, thyroid and uterus.

[0288] Leukemias, or cancers of the blood or bone marrow that are characterized by an abnormal proliferation of white blood cells i.e., leukocytes, can be divided into four major classifications including Acute lymphoblastic leukemia (ALL), Chronic lymphocytic leukemia (CLL), Acute myelogenous leukemia or acute myeloid leukemia (AML) (AML with translocations between chromosome 10 and 11 [t(10, 11)], chromosome 8 and 21 [t(8;21)], chromosome 15 and 17 [t(15;17)], and inversions in chromosome 16 [inv(16)]; AML with multilineage dysplasia, which includes patients who have had a prior myelodysplastic syndrome (MDS) or myeloproliferative disease that transforms into AML; AML and myelodysplastic syndrome (MDS), therapy-related, which category includes patients who have had prior chemotherapy and/or radiation and subsequently develop AML or MDS; d) AML not otherwise categorized, which includes subtypes of AML that do not fall into the above categories; and e) Acute leukemias of ambiguous lineage, which occur when the leukemic cells can not be classified as either myeloid or lymphoid cells, or where both types of cells are present); and Chronic myelogenous leukemia (CML).

[0289] The types of carcinomas include, but are not limited to, papilloma/carcinoma, choriocarcinoma, endodermal sinus tumor, teratoma, adenoma/adenocarcinoma, melanoma, fibroma, lipoma, leiomyoma, rhabdomyoma, mesothelioma, angioma, osteoma, chondroma, glioma, lymphoma/leukemia, squamous cell carcinoma, small cell carcinoma, large cell undifferentiated carcinomas, basal cell carcinoma and sinonasal undifferentiated carcinoma.

[0290] The types of sarcomas include, but are not limited to, soft tissue sarcoma such as alveolar soft part sarcoma, angiosarcoma, dermatofibrosarcoma, desmoid tumor, desmoplastic small round cell tumor, extraskeletal chondrosarcoma, extraskeletal osteosarcoma, fibrosarcoma, hemangiopericytoma, hemangiosarcoma, Kaposi's sarcoma, leiomyosarcoma, liposarcoma, lymphangiosarcoma, lymphosarcoma, malignant fibrous histiocytoma, neurofibrosarcoma, rhabdomyosarcoma, synovial sarcoma, and Askin's tumor, Ewing's sarcoma (primitive neuroectodermal tumor), malignant hemangioendothelioma, malignant schwannoma, osteosarcoma, and chondrosarcoma.

[0291] The invention further relates to the use of an iRNA or a pharmaceutical composition thereof, e.g., for treating a cancer, in combination with other pharmaceuticals and/or other therapeutic methods, e.g., with known pharmaceuticals and/or known therapeutic methods, such as, for example, those which are currently employed for treating these disorders. For example, the iRNA or pharmaceutical composition thereof can also be administered in conjunction with one or more additional anti-cancer treatments, such as biological, chemotherapy and radiotherapy. Accordingly, a treatment can include, for example, imatinib (Gleevac), all-trans-retinoic acid, a monoclonal antibody treatment (gemtuzumab, ozogamicin), chemotherapy (for example, chlorambucil, prednisone, prednisolone, vincristine, cytarabine, clofarabine, farnesyl transferase inhibitors, decitabine, inhibitors of MDR1), rituximab, interferon-a, anthracycline drugs (such as daunorubicin or idarubicin), L-asparaginase, doxorubicin, cyclophosphamide, doxorubicin, bleomycin, fludarabine, etoposide, pentostatin, or cladribine), bone marrow transplant, stem cell transplant, radiation therapy, anti-metabolite drugs (methotrexate and 6-mercaptopurine), or any combination thereof.

[0292] Radiation therapy (also called radiotherapy, X-ray therapy, or irradiation) is the use of ionizing radiation to kill cancer cells and shrink tumors. Radiation therapy can be administered externally via external beam radiotherapy (EBRT) or internally via brachytherapy. The effects of radiation therapy are localised and confined to the region being treated. Radiation therapy may be used to treat almost every type of solid tumor, including cancers of the brain, breast, cervix, larynx, lung, pancreas, prostate, skin, stomach, uterus, or soft tissue sarcomas. Radiation is also used to treat leukemia and lymphoma.

[0293] Chemotherapy is the treatment of cancer with drugs that can destroy cancer cells. In current usage, the term “chemotherapy” usually refers to cytotoxic drugs which affect rapidly dividing cells in general, in contrast with targeted therapy. Chemotherapy drugs interfere with cell division in various possible ways, e.g. with the duplication of DNA or the separation of newly formed chromosomes. Most forms of chemotherapy target all rapidly dividing cells and are not specific to cancer cells, although some degree of specificity may come from the inability of many cancer cells to repair DNA damage, while normal cells generally can. Most chemotherapy regimens are given in combination. Exemplary chemotherapeutic agents include, but are not limited to, 5-FU Enhancer, 9-AC, AG2037, AG3340, Aggrecanase Inhibitor, Aminoglutethimide, Amsacrine (m-AMSA), Asparaginase, Azacitidine, Batimastat (BB94), BAY 12-9566, BCH-4556, Bis-Naphtalimide, Busulfan, Capecitabine, Carboplatin, Carmustaine+Polifepr Osan, cdk4/cdk2 inhibitors, Chlorombucil, CI-994, Cisplatin, Cladribine, CS-682, Cytarabine HCl, D2163, Dactinomycin, Daunorubicin HCl, DepoCyt, Dexifosamide, Docetaxel, Dolastain, Doxifluridine, Doxorubicin, DX895If, E 7070, EGFR, Epirubicin, Erythropoietin, Estramustine phosphate sodium, Etoposide (VP16-213), Farnesyl Transferase Inhibitor, FK 317, Flavopiridol, Floxuridine, Fludarabine, Fluorouracil (5-FU), Flutamide, Fragyline, Gemcitabine, Hexamethylmelamine (HMM), Hydroxyurea (hydroxycarbamide), Ifosfamide, Interferon Alfa-2a, Interferon Alfa-2b, Interleukin-2, Irinotecan, ISI 641, Krestin, Lemonal DP 2202, Leuprolide acetate (LHRH-releasing factor analogue), Levamisole, LiGLA (lithium-gamma linolenate), Lodine Seeds, Lometexol, Lomustine (CCNU), Marimistat, Mechlorethamine HCl (nitrogen mustard), Megestrol acetate, Meglamine GLA, Mercaptopurine, Mesna, Mitoguazone (methyl-GAG; methyl glyoxal bis-guanylhydrazone; MGBG), Mitotane (o.p′-DDD), Mitoxantrone, Mitoxantrone HCl, MMI 270, MMP, MTA/LY 231514, Octreotide, ODN 698, OK-432, Oral Platinum, Oral Taxoid, Paclitaxel (TAXOL.RTM.), PARP Inhibitors, PD 183805, Pentostatin (2′ deoxycoformycin), PKC 412, Plicamycin, Procarbazine HCl, PSC 833, Ralitrexed, RAS Farnesyl Transferase Inhibitor, RAS Oncogene Inhibitor, Semustine (methyl-CCNU), Streptozocin, Suramin, Tamoxifen citrate, Taxane Analog, Temozolomide, Teniposide (VM-26), Thioguanine, Thiotepa, Topotecan, Tyrosine Kinase, UFT (Tegafur/Uracil), Valrubicin, Vinblastine sulfate, Vindesine sulfate, VX-710, VX-853, YM 116, ZD 0101, ZD 0473/Anormed, ZD 1839, ZD 9331.

[0294] Biological therapies use the body's immune system, either directly or indirectly, to fight cancer or to lessen the side effects that may be caused by some cancer treatments. In one sense, targeting CD274/PD-L1 can be considered in this group of therapies in that it can stimulate immune system action against a tumor, for example. However, this approach can also be considered with other such biological approaches, e.g., immune response modifying therapies such as the administration of interferons, interleukins, colony-stimulating factors, monoclonal antibodies, vaccines, gene therapy, and nonspecific immunomodulating agents are also envisioned as anti-cancer therapies to be combined with the inhibition of CD274/PD-L1. Small molecule targeted therapy drugs are generally inhibitors of enzymatic domains on mutated, overexpressed, or otherwise critical proteins within the cancer cell, such as tyrosine kinase inhibitors imatinib (Gleevec/Glivec) and gefitinib (Iressa). Examples of monoclonal antibody therapies that can be used with an iRNA or pharmaceutical composition thereof include, but are not limited to, the anti-HER2/neu antibody trastuzumab (Herceptin) used in breast cancer, and the anti-CD20 antibody rituximab, used in a variety of B-cell malignancies. The growth of some cancers can be inhibited by providing or blocking certain hormones. Common examples of hormone-sensitive tumors include certain types of breast and prostate cancers. Removing or blocking estrogen or testosterone is often an important additional treatment. In certain cancers, administration of hormone agonists, such as progestogens may be therapeutically beneficial.

[0295] Cancer immunotherapy refers to a diverse set of therapeutic strategies designed to induce the patient's own immune system to fight the tumor, and include, but are not limited to, intravesical BCG immunotherapy for superficial bladder cancer, vaccines to generate specific immune responses, such as for malignant melanoma and renal cell carcinoma, and the use of Sipuleucel-T for prostate cancer, in which dendritic cells from the patient are loaded with prostatic acid phosphatase peptides to induce a specific immune response against prostate-derived cells.

[0296] In some embodiments, an iRNA targeting CD274/PD-L1 is administered in combination with an angiogenesis inhibitor. In some embodiments, the angiogenesis inhibitors for use in the methods described herein include, but are not limited to, monoclonal antibody therapies directed against specific pro-angiogenic growth factors and/or their receptors. Examples of these are: bevacizumab (Avastin®), cetuximab (Erbitux®), panitumumab (Vectibix™), and trastuzumab (Herceptin®). In some embodiments, the angiogenesis inhibitors for use in the methods described herein include but are not limited to small molecule tyrosine kinase inhibitors (TKIs) of multiple pro-angiogenic growth factor receptors. The three TKIs that are currently approved as anti-cancer therapies are erlotinib (Tarceva®), sorafenib (Nexavar®), and sunitinib (Sutent®). In some embodiments, the angiogenesis inhibitors for use in the methods described herein include but are not limited to inhibitors of mTOR (mammalian target of rapamycin) such as temsirolimus (Toricel™), bortezomib (Velcade®), thalidomide (Thalomid®), and Doxycyclin,

[0297] In other embodiments, the angiogenesis inhibitors for use in the methods described herein include one or more drugs that target the VEGF pathway, including, but not limited to, Bevacizumab (Avastin®), sunitinib (Sutent®), and sorafenib (Nexavar®). Additional VEGF inhibitors include CP-547,632 (3-(4-Bromo-2,6-difluoro-benzyloxy)-5-[3-(4-pyrrolidin 1-yl- butyl)-ureido]-isothiazole-4-carboxylic acid amide hydrochloride; Pfizer Inc., NY), AG13736, AG28262 (Pfizer Inc.), SU5416, SU11248, & SU6668 (formerly Sugen Inc., now Pfizer, New York, New York), ZD-6474 (AstraZeneca), ZD4190 which inhibits VEGF-R2 and -R1 (AstraZeneca), CEP-7055 (Cephalon Inc., Frazer, PA), PKC 412 (Novartis), AEE788 (Novartis), AZD-2171), NEXAVAR® (BAY 43-9006, sorafenib; Bayer Pharmaceuticals and Onyx Pharmaceuticals), vatalanib (also known as PTK-787, ZK-222584: Novartis & Schering: AG), MACUGEN® (pegaptanib octasodium, NX-1838, EYE-001, Pfizer Inc./Gilead/Eyetech), IM862 (glufanide disodium, Cytran Inc. of Kirkland, Washington, USA), VEGFR2-selective monoclonal antibody DC101 (ImClone Systems, Inc.), angiozyme, a synthetic ribozyme from Ribozyme (Boulder, Colorado) and Chiron (Emeryville, California), Sirna-027 (an siRNA-based VEGFR1 inhibitor, Sirna Therapeutics, San Francisco, CA) Caplostatin, soluble ectodomains of the VEGF receptors, Neovastat (Eterna Zentaris Inc; Quebec City, CA), ZM323881 (CalBiochem. CA, USA), pegaptanib (Macugen) (Eyetech Pharmaceuticals), an anti-VEGF aptamer and combinations thereof.

[0298] In other embodiments, the angiogenesis inhibitors for use in the methods described herein include anti-angiogenic factors such as alpha-2 antiplasmin (fragment), angiostatin (plasminogen fragment), antiangiogenic antithrombin III, cartilage-derived inhibitor (CDI), CD59 complement fragment, endostatin (collagen XVIII fragment), fibronectin fragment, gro-beta (a C-X-C chemokine), heparinases heparin hexasaccharide fragment, human chorionic gonadotropin (hCG), interferon alpha/beta/gamma, interferon inducible protein (IP-10), interleukin-12, kringle 5 (plasminogen fragment), beta-thromboglobulin, EGF (fragment), VEGF inhibitor, endostatin, fibronectin (45 kD fragment), high molecular weight kininogen (domain 5), NK1, NK2, NK3 fragments of HGF, PF-4, serpin proteinase inhibitor 8, TGF-beta-1, thrombospondin-1, prosaposin, p53, angioarrestin, metalloproteinase inhibitors (TIMPs), 2-Methoxyestradiol, placental ribonuclease inhibitor, plasminogen activator inhibitor, prolactin 16kD fragment, proliferin-related protein (PRP), retinoids, tetrahydrocortisol-S transforming growth factor-beta (TGF-b), vasculostatin, and vasostatin (calreticulin fragment).pamidronate thalidomide, TNP470, the bisphosphonate family such as amino-bisphosphonate zoledronic acid, bombesin/gastrin-releasing peptide (GRP) antagonists such as RC-3095 and RC-3940-II (Bajol A M, et. al., British Journal of Cancer (2004) 90, 245-252), anti-VEGF peptide RRKRRR (dRK6) (SEQ ID NO: 925) (Seung-Ah Yoo, J.Immuno, 2005, 174: 5846-5855).

[0299] Efficacy of treatment, prevention, or amelioration of disease can be assessed, for example by measuring disease progression, disease remission, symptom severity, reduction in pain, quality of life, dose of a medication required to sustain a treatment effect, level of a disease marker or any other measurable parameter appropriate for a given disease being treated or targeted for prevention. It is well within the ability of one skilled in the art to monitor efficacy of treatment or prevention by measuring any one of such parameters, or any combination of parameters. In connection with the administration of an iRNA targeting CD274/PD-L1 or pharmaceutical composition thereof, “effective against” a cancer indicates that administration in a clinically appropriate manner results in a beneficial effect for at least a statistically significant fraction of patients, such as a improvement of symptoms, a cure, a reduction in disease load, reduction in tumor mass or cell numbers, extension of life, improvement in quality of life, or other effect generally recognized as positive by medical doctors familiar with treating the particular type of cancer.

[0300] A treatment or preventive effect is evident when there is a statistically significant improvement in one or more parameters of disease status, or by a failure to worsen or to develop symptoms where they would otherwise be anticipated. As an example, a favorable change of at least 10% in a measurable parameter of disease, and preferably at least 20%, 30%, 40%, 50% or more can be indicative of effective treatment. Efficacy for a given iRNA drug or formulation of that drug can also be judged using an experimental animal model for the given disease as known in the art. When using an experimental animal model, efficacy of treatment is evidenced when a statistically significant reduction in a marker or symptom is observed.

[0301] The invention relates in particular to the use of an iRNA targeting CD274/PD-L1 and compositions containing at least one such iRNA for the treatment of a CD274/PD-L1-mediated disorder or disease. For example, a composition containing an iRNA targeting a CD274/PD-L1 gene is used for treatment of an infectious disease or disorder, for example, in a subject having an infection. In some preferred embodiments the subject has an infection or is at risk of having an infection. An “infection” as used herein refers to a disease or condition attributable to the presence in a host of a foreign organism or agent that reproduces within the host. Infections typically involve breach of a normal mucosal or other tissue barrier by an infectious organism or agent. A subject that has an infection is a subject having objectively measurable infectious organisms or agents present in the subject's body. A subject at risk of having an infection is a subject that is predisposed to develop an infection. Such a subject can include, for example, a subject with a known or suspected exposure to an infectious organism or agent. A subject at risk of having an infection also can include a subject with a condition associated with impaired ability to mount an immune response to an infectious organism or agent, e.g., a subject with a congenital or acquired immunodeficiency, a subject undergoing radiation therapy or chemotherapy, a subject with a burn injury, a subject with a traumatic injury, a subject undergoing surgery or other invasive medical or dental procedure.

[0302] Infections are broadly classified as bacterial, viral, fungal, or parasitic based on the category of infectious organism or agent involved. Other less common types of infection are also known in the art, including, e.g., infections involving rickettsiae, mycoplasmas, and agents causing scrapie, bovine spongiform encephalopthy (BSE), and prion diseases (e.g., kuru and Creutzfeldt-Jacob disease). Examples of bacteria, viruses, fungi, and parasites which cause infection are well known in the art. An infection can be acute, subacute, chronic, or latent, and it can be localized or systemic. As defined herein, a “chronic infection” refers to those infections that are not cleared by the normal actions of the innate or adaptive immune responses and persist in the subject for a long duration of time, on the order of weeks, months, and years. A chronic infection may reflect latency of the infectious agent, and may be include periods in which no infectious symptoms are present, i.e., asymptomatic periods. Examples of chronic infections include, but are not limited to, HIV infection and herpesvirus infections. Furthermore, an infection can be predominantly intracellular or extracellular during at least one phase of the infectious organism's or agent's life cycle in the host.

[0303] Exemplary viruses include, but are not limited to: Retroviridae (e.g., human immunodeficiency viruses, such as HIV-1 (also referred to as HTLV-III), HIV-2, LAV or HTLV-III/LAV, or HIV-III, and other isolates, such as HIV-LP; Picornaviridae (e.g., polio viruses, hepatitis A virus; enteroviruses, human Coxsackie viruses, rhinoviruses, echoviruses); Calciviridae (e.g., strains that cause gastroenteritis); Togaviridae (e.g., equine encephalitis viruses, rubella viruses); Flaviviridae (e.g., dengue viruses, encephalitis viruses, yellow fever viruses); Coronaviridae (e.g., coronaviruses); Rhabdoviridae (e.g., vesicular stomatitis viruses, rabies viruses); Filoviridae (e.g., ebola viruses); Paramyxoviridae (e.g., parainfluenza viruses, mumps virus, measles virus, respiratory syncytial virus); adenovirus; Orthomyxoviridae (e.g., influenza viruses); Bungaviridae (e.g., Hantaan viruses, bunga viruses, phleboviruses and Nairo viruses); Arena viridae (hemorrhagic fever viruses); Reoviridae (e.g., reoviruses, orbiviurses and rotaviruses, i.e., Rotavirus A, Rotavirus B. Rotavirus C); Birnaviridae; Hepadnaviridae (Hepatitis A and B viruses); Parvoviridae (parvoviruses); Papovaviridae (papilloma viruses, polyoma viruses); Adenoviridae (most adenoviruses); Herpesviridae (herpes simplex virus (HSV) 1 and 2, Human herpes virus 6, Human herpes virus 7, Human herpes virus 8, varicella zoster virus, cytomegalovirus (CMV), herpes virus; Epstein-Barr virus; Rous sarcoma virus; West Nile virus; Japanese equine encephalitis, Norwalk, papilloma virus, parvovirus B19; Poxyiridae (variola viruses, vaccinia viruses, pox viruses); and Iridoviridae (e.g., African swine fever virus); Hepatitis D virus, Hepatitis E virus, and unclassified viruses (e.g., the etiological agents of Spongiform encephalopathies, the agent of delta hepatitis (thought to be a defective satellite of hepatitis B virus), the agents of non-A, non-B hepatitis (class 1=enterally transmitted; class 2=parenterally transmitted (i.e., Hepatitis C); Norwalk and related viruses, and astroviruses).

[0304] Bacteria include both Gram negative and Gram positive bacteria. Examples of Gram positive bacteria include, but are not limited to Pasteurella species, Staphylococci species, and Streptococcus species. Examples of Gram negative bacteria include, but are not limited to, Escherichia coli, Pseudomonas species, and Salmonella species. Specific examples of infectious bacteria include but are not limited to: Helicobacter pyloris, Borrelia burgdorferi, Legionella pneumophilia, Mycobacteria spp. (e.g., M. tuberculosis, M. avium, M. intracellulare, M. kansasii, M. gordonae, M. leprae), Staphylococcus aureus, Neisseria gonorrhoeae, Neisseria meningitidis, Listeria monocytogenes, Streptococcus pyogenes (Group A Streptococcus), Streptococcus agalactiae (Group B Streptococcus), Streptococcus (viridans group), Streptococcus faecalis, Streptococcus bovis, Streptococcus (anaerobic spp.), Streptococcus pneumoniae, pathogenic Campylobacter spp., Enterococcus spp., Haemophilus influenzae (Hemophilus influenza B, and Hemophilus influenza non-typable), Bacillus anthracis, Corynebacterium diphtheriae, Corynebacterium spp., Erysipelothrix rhusiopathiae, Clostridium perfringens, Clostridium tetani, Enterobacter aerogenes, Klebsiella pneumoniae, Pasteurella multocida, Bacteroides spp., Fusobacterium nucleatum, Streptobacillus moniliformis, Treponema pallidum, Treponema pertenue, Leptospira, Rickettsia, Actinomyces israelii, meningococcus, pertussis, pneumococcus, shigella, tetanus, Vibrio cholerae, yersinia, Pseudomonas species, Clostridia species, Salmonella typhi, Shigella dysenteriae, Yersinia pestis, Brucella species, Legionella pneumophila, Rickettsiae, Chlamydia, Clostridium perfringens, Clostridium botulinum, Staphylococcus aureus, Pseudomonas aeruginosa, Cryptosporidium parvum, Streptococcus pneumoniae, and Bordetella pertussis.

[0305] Exemplary fungi and yeast include, but are not limited to, Cryptococcus neoformans, Candida albicans, Candida tropicalis, Candida stellatoidea, Candida glabrata, Candida krusei, Candida parapsilosis, Candida guilliermondii, Candida viswanathii, Candida lusitaniae, Rhodotorula mucilaginosa, Aspergillus fumigatus, Aspergillus flavus, Blastomyces dermatitidis, Aspergillus clavatus, Cryptococcus neoformans, Chlamydia trachomatis, Coccidioides immitis, Cryptococcus laurentii, Cryptococcus albidus, Cryptococcus gattii, Nocardia spp, Histoplasma capsulatum, Pneumocystis jirovecii (or Pneumocystis carinii), Stachybotrys chartarum, and any combination thereof.

[0306] Exemplary parasites include, but are not limited to: Entamoeba histolytica; Plasmodium species (Plasmodium falciparum, Plasmodium malariae, Plasmodium ovale, Plasmodium vivax), Leishmania species (Leishmania tropica, Leishmania braziliensis, Leishmania donovani), Toxoplasmosis (Toxoplasma gondii), Trypanosoma gambiense, Trypanosoma rhodesiense (African sleeping sickness), Trypanosoma cruzi (Chagas' disease), Helminths (flat worms, round worms), Babesia microti, Babesia divergens, Giardia lamblia, and any combination thereof.

[0307] The invention further relates to the use of an iRNA targeting CD274/PD-L1 and compositions containing at least one such iRNA for the treatment of an infectious disease, such as hepatitis B or a chronic bacterial infection, in combination with other pharmaceuticals and/or other therapeutic methods, e.g., with known pharmaceuticals and/or known therapeutic methods, such as, for example, those which are currently employed for treating such infectious diseases or disorders (e.g., antibiotics, anti-viral agents). For example, in certain embodiments, administration of a dsRNA targeting CD274/PD-L1 is administered in combination with an antibacterial agent. Examples of anti-bacterial agents useful for the methods described herein include, but are not limited to, natural penicillins, semi-synthetic penicillins, clavulanic acid, cephalolsporins, bacitracin, ampicillin, carbenicillin, oxacillin, azlocillin, mezlocillin, piperacillin, methicillin, dicloxacillin, nafcillin, cephalothin, cephapirin, cephalexin, cefamandole, cefaclor, cefazolin, cefuroxine, cefoxitin, cefotaxime, cefsulodin, cefetamet, cefixime, ceftriaxone, cefoperazone, ceftazidine, moxalactam, carbapenems, imipenems, monobactems, euztreonam, vancomycin, polymyxin, amphotericin B, nystatin, imidazoles, clotrimazole, miconazole, ketoconazole, itraconazole, fluconazole, rifampins, ethambutol, tetracyclines, chloramphenicol, macrolides, aminoglycosides, streptomycin, kanamycin, tobramycin, amikacin, gentamicin, tetracycline, minocycline, doxycycline, chlortetracycline, erythromycin, roxithromycin, clarithromycin, oleandomycin, azithromycin, chloramphenicol, quinolones, co-trimoxazole, norfloxacin, ciprofloxacin, enoxacin, nalidixic acid, temafloxacin, sulfonamides, gantrisin, and trimethoprim; Acedapsone; Acetosulfone Sodium; Alamecin; Alexidine; Amdinocillin; Amdinocillin Pivoxil; Amicycline; Amifloxacin; Amifloxacin Mesylate; Amikacin; Amikacin Sulfate; Aminosalicylic acid; Aminosalicylate sodium; Amoxicillin; Amphomycin; Ampicillin; Ampicillin Sodium; Apalcillin Sodium; Apramycin; Aspartocin; Astromicin Sulfate; Avilamycin; Avoparcin; Azithromycin; Azlocillin; Azlocillin Sodium; Bacampicillin Hydrochloride; Bacitracin; Bacitracin Methylene Disalicylate; Bacitracin Zinc; Bambermycins; Benzoylpas Calcium; Berythromycin; Betamicin Sulfate; Biapenem; Biniramycin; Biphenamine Hydrochloride; Bispyrithione Magsulfex; Butikacin; Butirosin Sulfate; Capreomycin Sulfate; Carbadox; Carbenicillin Disodium; Carbenicillin Indanyl Sodium; Carbenicillin Phenyl Sodium; Carbenicillin Potassium; Carumonam Sodium; Cefaclor; Cefadroxil; Cefamandole; Cefamandole Nafate; Cefamandole Sodium; Cefaparole; Cefatrizine; Cefazaflur Sodium; Cefazolin; Cefazolin Sodium; Cefbuperazone; Cefdinir; Cefepime; Cefepime Hydrochloride; Cefetecol; Cefixime; Cefinenoxime Hydrochloride; Cefinetazole; Cefinetazole Sodium; Cefonicid Monosodium; Cefonicid Sodium; Cefoperazone Sodium; Ceforanide; Cefotaxime Sodium; Cefotetan; Cefotetan Disodium; Cefotiam Hydrochloride; Cefoxitin; Cefoxitin Sodium; Cefpimizole; Cefpimizole Sodium; Cefpiramide; Cefpiramide Sodium; Cefpirome Sulfate; Cefpodoxime Proxetil; Cefprozil; Cefroxadine; Cefsulodin Sodium; Ceftazidime; Ceftibuten; Ceftizoxime Sodium; Ceftriaxone Sodium; Cefuroxime; Cefuroxime Axetil; Cefuroxime Pivoxetil; Cefuroxime Sodium; Cephacetrile Sodium; Cephalexin; Cephalexin Hydrochloride; Cephaloglycin; Cephaloridine; Cephalothin Sodium; Cephapirin Sodium; Cephradine; Cetocycline Hydrochloride; Cetophenicol; Chloramphenicol; Chloramphenicol Palmitate; Chloramphenicol Pantothenate Complex; Chloramphenicol Sodium Succinate; Chlorhexidine Phosphanilate; Chloroxylenol; Chlortetracycline Bisulfate; Chlortetracycline Hydrochloride; Cinoxacin; Ciprofloxacin; Ciprofloxacin Hydrochloride; Cirolemycin; Clarithromycin; Clinafloxacin Hydrochloride; Clindamycin; Clindamycin Hydrochloride; Clindamycin Palmitate Hydrochloride; Clindamycin Phosphate; Clofazimine; Cloxacillin Benzathine; Cloxacillin Sodium; Cloxyquin; Colistimethate Sodium; Colistin Sulfate; Coumermycin; Coumermycin Sodium; Cyclacillin; Cycloserine; Dalfopristin; Dapsone; Daptomycin; Demeclocycline; Demeclocycline Hydrochloride; Demecycline; Denofungin; Diaveridine; Dicloxacillin; Dicloxacillin Sodium; Dihydrostreptomycin Sulfate; Dipyrithione; Dirithromycin; Doxycycline; Doxycycline Calcium; Doxycycline Fosfatex; Doxycycline Hyclate; Droxacin Sodium; Enoxacin; Epicillin; Epitetracycline Hydrochloride; Erythromycin; Erythromycin Acistrate; Erythromycin Estolate; Erythromycin Ethylsuccinate; Erythromycin Gluceptate; Erythromycin Lactobionate; Erythromycin Propionate; Erythromycin Stearate; Ethambutol Hydrochloride; Ethionamide; Fleroxacin; Floxacillin; Fludalanine; Flumequine; Fosfomycin; Fosfomycin Tromethamine; Fumoxicillin; Furazolium Chloride; Furazolium Tartrate; Fusidate Sodium; Fusidic Acid; Gentamicin Sulfate; Gloximonam; Gramicidin; Haloprogin; Hetacillin; Hetacillin Potassium; Hexedine; Ibafloxacin; Inipenem; Isoconazole; Isepamicin; Isoniazid; Josamycin; Kanamycin Sulfate; Kitasamycin; Levofuraltadone; Levopropylcillin Potassium; Lexithromycin; Lincomycin; Lincomycin Hydrochloride; Lomefloxacin; Lomefloxacin Hydrochloride; Lomefloxacin Mesylate; Loracarbef; Mafenide; Meclocycline; Meclocycline Sulfosalicylate; Megalomicin Potassium Phosphate; Mequidox; Meropenem; Methacycline; Methacycline Hydrochloride; Methenamine; Methenamine Hippurate; Methenamine Mandelate; Methicillin Sodium; Metioprim; Metronidazole Hydrochloride; Metronidazole Phosphate; Mezlocillin; Mezlocillin Sodium; Minocycline; Minocycline Hydrochloride; Mirincamycin Hydrochloride; Monensin; Monensin Sodium; Nafcillin Sodium; Nalidixate Sodium; Nalidixic Acid; Natamycin; Nebramycin; Neomycin Palmitate; Neomycin Sulfate; Neomycin Undecylenate; Netilmicin Sulfate; Neutramycin; Nifuradene; Nifuraldezone; Nifuratel; Nifuratrone; Nifurdazil; Nifurimide; Nifurpirinol; Nifurquinazol; Nifurthiazole; Nitrocycline; Nitrofurantoin; Nitromide; Norfloxacin; Novobiocin Sodium; Ofloxacin; Ormetoprim; Oxacillin Sodium; Oximonam; Oximonam Sodium; Oxolinic Acid; Oxytetracycline; Oxytetracycline Calcium; Oxytetracycline Hydrochloride; Paldimycin; Parachlorophenol; Paulomycin; Pefloxacin; Pefloxacin Mesylate; Penamecillin; Penicillin G Benzathine; Penicillin G Potassium; Penicillin G Procaine; Penicillin G Sodium; Penicillin V; Penicillin V Benzathine; Penicillin V Hydrabamine; Penicillin V Potassium; Pentizidone Sodium; Phenyl Aminosalicylate; Piperacillin Sodium; Pirbenicillin Sodium; Piridicillin Sodium; Pirlimycin Hydrochloride; Pivampicillin Hydrochloride; Pivampicillin Pamoate; Pivampicillin Probenate; Polymyxin B Sulfate; Porfiromycin; Propikacin; Pyrazinamide; Pyrithione Zinc; Quindecamine Acetate; Quinupristin; Racephenicol; Ramoplanin; Ranimycin; Relomycin; Repromicin; Rifabutin; Rifametane; Rifamexil; Rifamide; Rifampin; Rifapentine; Rifaximin; Rolitetracycline; Rolitetracycline Nitrate; Rosaramicin; Rosaramicin Butyrate; Rosaramicin Propionate; Rosaramicin Sodium Phosphate; Rosaramicin Stearate; Rosoxacin; Roxarsone; Roxithromycin; Sancycline; Sanfetrinem Sodium; Sarmoxicillin; Sarpicillin; Scopafungin; Sisomicin; Sisomicin Sulfate; Sparfloxacin; Spectinomycin Hydrochloride; Spiramycin; Stallimycin Hydrochloride; Steffimycin; Streptomycin Sulfate; Streptonicozid; Sulfabenz; Sulfabenzamide; Sulfacetamide; Sulfacetamide Sodium; Sulfacytine; Sulfadiazine; Sulfadiazine Sodium; Sulfadoxine; Sulfalene; Sulfamerazine; Sulfameter; Sulfamethazine; Sulfamethizole; Sulfamethoxazole; Sulfamonomethoxine; Sulfamoxole; Sulfanilate Zinc; Sulfanitran; Sulfasalazine; Sulfasomizole; Sulfathiazole; Sulfazamet; Sulfisoxazole; Sulfisoxazole Acetyl; Sulfisoxazole Diolamine; Sulfomyxin; Sulopenem; Sultamicillin; Suncillin Sodium; Talampicillin Hydrochloride; Teicoplanin; Temafloxacin Hydrochloride; Temocillin; Tetracycline; Tetracycline Hydrochloride; Tetracycline Phosphate Complex; Tetroxoprim; Thiamphenicol; Thiphencillin Potassium; Ticarcillin Cresyl Sodium; Ticarcillin Disodium; Ticarcillin Monosodium; Ticlatone; Tiodonium Chloride; Tobramycin; Tobramycin Sulfate; Tosufloxacin; Trimethoprim; Trimethoprim Sulfate; Trisulfapyrimidines; Troleandomycin; Trospectomycin Sulfate; Tyrothricin; Vancomycin; Vancomycin Hydrochloride; Virginiamycin; and Zorbamycin.

[0308] In other embodiments, administration of a dsRNA targeting CD274/PD-L1 is performed in combination with an anti-viral medicament or agent. Exemplary antiviral agents useful for the methods described herein include, but are not limited to, immunoglobulins, amantadine, interferon, nucleoside analogues, and protease inhibitors. Specific examples of antiviral agents include but are not limited to Acemannan; Acyclovir; Acyclovir Sodium; Adefovir; Alovudine; Alvircept Sudotox; Amantadine Hydrochloride; Aranotin; Arildone; Atevirdine Mesylate; Avridine; Cidofovir; Cipamfylline; Cytarabine Hydrochloride; Delavirdine Mesylate; Desciclovir; Didanosine; Disoxaril; Edoxudine; Enviradene; Enviroxime; Famciclovir; Famotine Hydrochloride; Fiacitabine; Fialuridine; Fosarilate; Foscamet Sodium; Fosfonet Sodium; Ganciclovir; Ganciclovir Sodium; Idoxuridine; Kethoxal; Lamivudine; Lobucavir; Memotine Hydrochloride; Methisazone; Nevirapine; Penciclovir; Pirodavir; Ribavirin; Rimantadine Hydrochloride; Saquinavir Mesylate; Somantadine Hydrochloride; Sorivudine; Statolon; Stavudine; Tilorone Hydrochloride; Trifluridine; Valacyclovir Hydrochloride; Vidarabine; Vidarabine Phosphate; Vidarabine Sodium Phosphate; Viroxime; Zalcitabine; Zidovudine; and Zinviroxime.

[0309] In other embodiments, administration of a dsRNA targeting CD274/PD-L1 is performed in combination with an anti-fungal medicament or agent. An “antifungal medicament” is an agent that kills or inhibits the growth or function of infective fungi. Anti-fungal medicaments are sometimes classified by their mechanism of action. Some anti-fungal agents function as cell wall inhibitors by inhibiting glucose synthase, other antifungal agents function by destabilizing membrane integrity, and other antifungal agents function by breaking down chitin (e.g., chitinase) or immunosuppression (501 cream). Thus, exemplary antifungal medicaments useful for the methods described herein include, but are not limited to, imidazoles, 501 cream, and Acrisorcin, Ambruticin, Amorolfine, Amphotericin B, Azaconazole, Azaserine, Basifungin, BAY 38-9502, Bifonazole, Biphenamine Hydrochloride, Bispyrithione Magsulfex, Butenafine, Butoconazole Nitrate, Calcium Undecylenate, Candicidin, Carbol-Fuchsin, Chitinase, Chlordantoin, Ciclopirox, Ciclopirox Olamine, Cilofungin, Cisconazole, Clotrimazole, Cuprimyxin, Denofungin, Dipyrithione, Doconazole, Econazole, Econazole Nitrate, Enilconazole, Ethonam Nitrate, Fenticonazole Nitrate, Filipin, FK 463, Fluconazole, Flucytosine, Fungimycin, Griseofulvin, Hamycin, Isoconazole, Itraconazole, Kalafungin, Ketoconazole, Lomofungin, Lydimycin, Mepartricin, Miconazole, Miconazole Nitrate, MK 991, Monensin, Monensin Sodium, Naftifine Hydrochloride, Neomycin Undecylenate, Nifuratel, Nifurmerone, Nitralamine Hydrochloride, Nystatin, Octanoic Acid, Orconazole Nitrate, Oxiconazole Nitrate, Oxifungin Hydrochloride, Parconazole Hydrochloride, Partricin, Potassium Iodide, Pradimicin, Proclonol, Pyrithione Zinc, Pyrrolnitrin, Rutamycin, Sanguinarium Chloride, Saperconazole, Scopafungin, Selenium Sulfide, Sertaconazole, Sinefungin, Sulconazole Nitrate, Terbinafine, Terconazole, Thiram, Ticlatone, Tioconazole, Tolciclate, Tolindate, Tolnaftate, Triacetin, Triafungin, UK 292, Undecylenic Acid, Viridofulvin, Voriconazole, Zinc Undecylenate, and Zinoconazole Hydrochloride.

[0310] In further embodiments, administration of a dsRNA targeting CD274/PD-L1 is administered in combination with an anti-parasitic medicament or agent. An “antiparasitic medicament” refers to an agent that kills or inhibits the growth or function of infective parasites. Examples of antiparasitic medicaments, also referred to as parasiticides, useful for the methods described herein include, but are not limited to, albendazole, amphotericin B, benznidazole, bithionol, chloroquine HCl, chloroquine phosphate, clindamycin, dehydroemetine, diethylcarbamazine, diloxanide furoate, doxycycline, eflomithine, furazolidaone, glucocorticoids, halofantrine, iodoquinol, ivermectin, mebendazole, mefloquine, meglumine antimoniate, melarsoprol, metrifonate, metronidazole, niclosamide, nifurtimox, oxamniquine, paromomycin, pentamidine isethionate, piperazine, praziquantel, primaquine phosphate, proguanil, pyrantel pamoate, pyrimethanmine-sulfonamides, pyrimethanmine-sulfadoxine, quinacrine HCl, quinine sulfate, quinidine gluconate, spiramycin, stibogluconate sodium (sodium antimony gluconate), suramin, tetracycline, thiabendazole, timidazole, trimethroprim-sulfamethoxazole, and tryparsamide, some of which are used alone or in combination with others.

[0311] The iRNA and an additional therapeutic agent can be administered in combination in the same composition, e.g., parenterally, or the additional therapeutic agent can be administered as part of a separate composition or by another method described herein.

[0312] Patients can be administered a therapeutic amount of iRNA, such as 0.01 mg/kg, 0.05 mg/kg, 0.1 mg/kg, 0.5 mg/kg, 1.0 mg/kg, 1.5 mg/kg, 2.0 mg/kg, or 2.5 mg/kg dsRNA. The iRNA can be administered by intravenous infusion over a period of time, such as over a 5 minute, 10 minute, 15 minute, 20 minute, or 25 minute period. The administration is repeated, for example, on a regular basis, such as biweekly (i.e., every two weeks) for one month, two months, three months, four months or longer. After an initial treatment regimen, the treatments can be administered on a less frequent basis. For example, after administration biweekly for three months, administration can be repeated once per month, for six months or a year or longer. Administration of the iRNA can reduce CD274/PD-L1 levels, e.g., in a cell, tissue, blood, urine or other compartment of the patient by at least 10%, at least 15%, at least 20%, at least 25%, at least 30%, at least 40%, at least 50%, at least 60%, at least 70%, at least 80% or at least 90% or more.

[0313] Before administration of a full dose of the iRNA, patients can be administered a smaller dose, such as a 5% infusion reaction, and monitored for adverse effects, such as an allergic reaction, or for elevated lipid levels or blood pressure. In another example, the patient can be monitored for unwanted immunostimulatory effects, such as increased cytokine (e.g., TNF-alpha or INF-alpha) levels.

[0314] Genetic predisposition plays a role in the development of some cancers and hematological malignancies. Therefore, a patient in need of a CD274/PD-L1 iRNA may be identified by taking a family history, or, for example, screening for one or more genetic markers or variants. A healthcare provider, such as a doctor, nurse, or family member, can take a family history before prescribing or administering a CD274/PD-L1 dsRNA. For example, certain variants in the BRCA1 and BRCA2 genes are known to cause an increased risk for breast and ovarian cancers. A DNA test may also be performed on the patient to identify a mutation in the CD274/PD-L1 gene, before a CD274/PD-L1 dsRNA is administered to the patient.

[0315] Owing to the inhibitory effects on CD274/PD-L1 expression, a composition according to the invention or a pharmaceutical composition prepared therefrom can enhance the quality of life.

### Methods for Modulating Expression of a CD274/PD-L1 Gene

[0316] In yet another aspect, the invention provides a method for modulating (e.g., inhibiting or activating) the expression of a CD274/PD-L1 gene in a mammal.

[0317] In one embodiment, the method includes administering a composition featured in the invention to the mammal such that expression or activity of the target CD274/PD-L1 gene is decreased, such as for an extended duration, e.g., at least two, three, four days or more, e.g., one week, two weeks, three weeks, or four weeks or longer. In some embodiments, CD274/PD-L1 expression or activity is decreased by at least 10%, at least 15%, at least 20%, at least 25%, at least 30%, at least 40%, at least 50%, or at least 60%, or more, as compared to pretreatment levels.

[0318] In another embodiment, the method includes administering a composition as described herein to a mammal such that expression or activity of the target CD274/PD-L1 gene is increased by e.g., at least 10% compared to an untreated animal. In some embodiments, the activation of CD274/PD-L1 occurs over an extended duration, e.g., at least two, three, four days or more, e.g., one week, two weeks, three weeks, four weeks, or more. Without wishing to be bound by theory, an iRNA can activate CD274/PD-L1 expression by stabilizing the CD274/PD-L1 mRNA transcript, interacting with a promoter in the genome, and/or inhibiting an inhibitor of CD274/PD-L1 expression.

[0319] Preferably, the iRNAs useful for the methods and compositions featured in the invention specifically target RNAs (primary or processed) of the target CD274/PD-L1 gene. Compositions and methods for inhibiting the expression of these CD274/PD-L1 genes using iRNAs can be prepared and performed as described elsewhere herein.

[0320] In one embodiment, the method includes administering a composition containing an iRNA, where the iRNA includes a nucleotide sequence that is complementary to at least a part of an RNA transcript of the CD274/PD-L1 gene of the mammal to be treated. When the organism to be treated is a mammal such as a human, the composition may be administered by any means known in the art including, but not limited to oral, intraperitoneal, or parenteral routes, including intracranial (e.g., intraventricular, intraparenchymal and intrathecal), intravenous, intramuscular, subcutaneous, transdermal, airway (aerosol), nasal, rectal, and topical (including buccal and sublingual) administration. In certain embodiments, the compositions are administered by intravenous infusion or injection.

[0321] Unless otherwise defined, all technical and scientific terms used herein have the same meaning as commonly understood by one of ordinary skill in the art to which this invention belongs. Although methods and materials similar or equivalent to those described herein can be used in the practice or testing of the iRNAs and methods featured in the invention, suitable methods and materials are described below. All publications, patent applications, patents, and other references mentioned herein are incorporated by reference in their entirety. In case of conflict, the present specification, including definitions, will control. In addition, the materials, methods, and examples are illustrative only and not intended to be limiting.

### EXAMPLES

### Example 1. iRNA Synthesis

### Source of Reagents

[0322] Where the source of a reagent is not specifically given herein, such reagent may be obtained from any supplier of reagents for molecular biology at a quality/purity standard for application in molecular biology.

### Oligonucleotide Synthesis.

[0323] Applicants have used several different methods to generate the iRNA molecules described herein. This Example describes one approach that has been used. The ordinarily skilled artisan can use any method known in the art to prepare iRNAs as described herein.

[0324] Oligonucleotides are synthesized on an AKTA oligopilot synthesizer. Commercially available controlled pore glass solid support (dT-CPG, 500\acute{Å}, Prime Synthesis) and RNA phosphoramidites with standard protecting groups, 5′-O-dimethoxytrityl N6-benzoyl-2′-t-butyldimethylsilyl-adenosine-3′-O-N,N′-diisopropyl-2-cyanoethylphosphoramidite, 5′-O-dimethoxytrityl-N4-acetyl-2′-t-butyldimethylsilyl-cytidine-3′-O-N,N′-diisopropyl-2-cyanoethylphosphoramidite, 5′-O-dimethoxytrityl-N2-isobutryl-2′-t-butyldimethylsilyl-guanosine-3′-O-N,N′-diisopropyl-2-cyanoethylphosphoramidite, and 5′-O-dimethoxytrityl-2′-t-butyldimethylsilyl-uridine-3′-O-N,N′-diisopropyl-2-cyanoethylphosphoramidite (Pierce Nucleic Acids Technologies) were used for the oligonucleotide synthesis. The 2′-F phosphoramidites, 5′-O-dimethoxytrityl-N4-acetyl-2′-fluro-cytidine-3′-O-N,N′-diisopropyl-2-cyanoethyl-phosphoramidite and 5′-O-dimethoxytrityl-2′-fluro-uridine-3′-O-N,N′-diisopropyl-2-cyanoethyl-phosphoramidite are purchased from (Promega). All phosphoramidites are used at a concentration of 0.2M in acetonitrile (CH₃CN) except for guanosine which is used at 0.2M concentration in 10% THF/ANC (v/v). Coupling/recycling time of 16 minutes is used. The activator is 5-ethyl thiotetrazole (0.75M, American International Chemicals); for the PO-oxidation iodine/water/pyridine is used and for the PS-oxidation PADS (2%) in 2,6-lutidine/ACN (1:1 v/v) is used.

[0325] 3′-ligand conjugated strands are synthesized using solid support containing the corresponding ligand. For example, the introduction of cholesterol unit in the sequence is performed from a hydroxyprolinol-cholesterol phosphoramidite. Cholesterol is tethered to trans-4-hydroxyprolinol via a 6-aminohexanoate linkage to obtain a hydroxyprolinol-cholesterol moiety. 5′-end Cy-3 and Cy-5.5 (fluorophore) labeled iRNAs are synthesized from the corresponding Quasar-570 (Cy-3) phosphoramidite are purchased from Biosearch Technologies. Conjugation of ligands to 5′-end and or internal position is achieved by using appropriately protected ligand-phosphoramidite building block. An extended 15 min coupling of 0.1 M solution of phosphoramidite in anhydrous CH₃CN in the presence of 5-(ethylthio)-1H-tetrazole activator to a solid-support-bound oligonucleotide. Oxidation of the internucleotide phosphite to the phosphate is carried out using standard iodine-water as reported (1) or by treatment with tert-butyl hydroperoxide/acetonitrile/water (10:87:3) with 10 min oxidation wait time conjugated oligonucleotide. Phosphorothioate is introduced by the oxidation of phosphite to phosphorothioate by using a sulfur transfer reagent such as DDTT (purchased from AM Chemicals), PADS and or Beaucage reagent. The cholesterol phosphoramidite is synthesized in house and used at a concentration of 0.1 M in dichloromethane. Coupling time for the cholesterol phosphoramidite is 16 minutes.

### Deprotection I (Nucleobase Deprotection)

[0326] After completion of synthesis, the support is transferred to a 100 mL glass bottle (VWR). The oligonucleotide is cleaved from the support with simultaneous deprotection of base and phosphate groups with 80 mL of a mixture of ethanolic ammonia [ammonia: ethanol (3:1)] for 6.5 h at 55° C. The bottle is cooled briefly on ice and then the ethanolic ammonia mixture is filtered into a new 250-mL bottle. The CPG is washed with 2×40 mL portions of ethanol/water (1:1 v/v). The volume of the mixture is then reduced to ˜30 mL by roto-vap. The mixture is then frozen on dry ice and dried under vacuum on a speed vac.

### Deprotection II (Removal of 2′-TBDMS Group)

[0327] The dried residue is resuspended in 26 mL of triethylamine, triethylamine trihydrofluoride (TEA·3HF) or pyridine-HF and DMSO (3:4:6) and heated at 60° C. for 90 minutes to remove the tert-butyldimethylsilyl (TBDMS) groups at the 2′ position. The reaction is then quenched with 50 mL of 20 mM sodium acetate and the pH is adjusted to 6.5. Oligonucleotide is stored in a freezer until purification.

### Analysis

[0328] The oligonucleotides are analyzed by high-performance liquid chromatography (HPLC) prior to purification and selection of buffer and column depends on nature of the sequence and or conjugated ligand.

### HPLC Purification

[0329] The ligand-conjugated oligonucleotides are purified by reverse-phase preparative HPLC. The unconjugated oligonucleotides are purified by anion-exchange HPLC on a TSK gel column packed in house. The buffers are 20 mM sodium phosphate (pH 8.5) in 10% CH₃CN (buffer A) and 20 mM sodium phosphate (pH 8.5) in 10% CH₃CN, 1M NaBr (buffer B). Fractions containing full-length oligonucleotides are pooled, desalted, and lyophilized. Approximately 0.15 OD of desalted oligonucleotides are diluted in water to 150 μL and then pipetted into special vials for CGE and LC/MS analysis. Compounds are then analyzed by LC-ESMS and CGE.

iRNA Preparation

[0330] For the general preparation of iRNA, equimolar amounts of sense and antisense strand are heated in 1×PBS at 95° C. for 5 min and slowly cooled to room temperature. Integrity of the duplex is confirmed by HPLC analysis.

[0331] Nucleic acid sequences are represented below using standard nomenclature, and specifically the abbreviations of Table 1.

TABLE 1
Abbreviations of nucleotide monomers used in
nucleic acid sequence representation. It will
be understood that these monomers, when
present in an oligonucleotide, are mutually
linked by 5′-3′-phosphodiester bonds.

| Abbreviation | Nucleotide(s) |
|---|---|
| A | adenosine |
| C | cytidine |
| G | guanosine |
| T | thymidine |
| U | uridine |
| N | any nucleotide (G, A, C, T or U) |
| a | 2′-O-methyladenosine |
| c | 2′-O-methylcytidine |
| g | 2′-O-methylguanosine |
| u | 2′-O-methyluridine |
| dT | 2′-deoxythymidine |
| s | phosphorothioate linkage |

### Example 2. CD274/PD-L1 siRNA Design and Synthesis

### Transcripts

[0332] Oligonucleotide design was carried out to identify siRNAs targeting the gene encoding the human “CD274 molecule” (NCBI human symbol CD274) and the orthologous sequences from mice (Mus musculus) and rat (Rattus norvegicus). The design process used the CD274 transcripts NM_014143.2 from human (NCBI GeneId 29126; SEQ ID NO: 869, FIG. 1), NM_021893.2 from mouse (NCBI GeneId 60533; SEQ ID NO: 870, FIG. 2), and both XM_001079572.1 and XM_574652.2 from rat (NCBI GeneId 499342; SEQ ID NO: 871, FIG. 3 and SEQ ID NO: 872, FIG. 4 respectively). All sequences were obtained from the NCBI Refseq collection.

[0333] Two sets of oligos were designed: a human-specific set of oligos with 100% identity to human CD274, but less than 100% identity in mouse or rat, and a second set of siRNAs with 100% identity to the single mouse and both rat CD274 transcripts. All siRNA duplexes were designed with 100% identity to their respective CD274 transcripts.

[0334] A total of 456 sense human CD274/PD-L1 derived siRNA oligos were synthesized and formed into duplexes. The sense and corresponding antisense oligos are presented in Table 2 (SEQ ID NO: 5-SEQ ID NO: 436), Table 3 (SEQ ID NO: 437-SEQ ID NO: 868), and Table 5 (SEQ ID NO: 877-SEQ ID NO: 924) (human CD274/PD-L1, SEQ ID NO: 869) for use in the various aspects and embodiments described herein. In Tables 2 and 3, corresponding sense and antisense sequences have been designated or assigned adjacent sequence identifiers, e.g., SEQ ID NO: 5 (sense) and SEQ ID NO: 6 (antisense). In Table 5, corresponding sense and antisense sequences have not been designated adjacent sequence identifiers, but are found at the same row. In Table 5, sense oligonucleotide sequence identifiers are found at column 3 and the sense oligonucleotide sequences at column 5, and the antisense oligonucleotide sequence identifiers are found at at column 6 and the antisense oligonucleotide sequences at column 8. For example, the corresponding antisense sequence for sense sequence SEQ ID NO.: 878 is SEQ ID NO: 902, at the same row.

siRNA Design and Specificity Prediction

[0335] The specificity of the 19 mer oligo sets was predicted from each sequence. The CD274 siRNAs were used in a comprehensive search against their respective human, or mouse and rat transcriptomes (defined as the set of NM_and XM_ records within the NCBI Refseq set) using the FASTA algorithm. The Python script ‘offtargetFasta.py’ was then used to parse the alignments and generate a score based on the position and number of mismatches between the siRNA and any potential ‘off-target’ transcript. The off-target score is weighted to emphasize differences in the ‘seed’ region of siRNAs, in positions 2-9 from the 5′ end of the molecule. The off-target score is calculated as follows: mismatches between the oligo and the transcript are given penalties. A mismatch in the seed region in positions 2-9 of the oligo is given a penalty of 2.8; mismatches in the putative cleavage sites 10 and 11 are given a penalty of 1.2, and all other mismatches a penalty of 1. The off-target score for each oligo-transcript pair is then calculated by summing the mismatch penalties. The lowest off-target score from all the oligo-transcript pairs is then determined and used in subsequent sorting of oligos. Both siRNAs strands were assigned to a category of specificity according to the calculated scores: a score above 3 qualifies as highly specific, equal to 3 as specific and between 2.2 and 2.8 as moderate specific. In picking which oligos to synthesize, we sorted from high to low by the off-target score of the antisense strand and took the best (lowest off-target score) oligo pairs.

### Synthesis of CD274 Sequences

[0336] CD274 sequences were synthesized on a MerMade 192 synthesizer at 1 μmol scale.

[0337] For all the sequences in the list, ‘endolight’ chemistry was applied as detailed below.
[0338] All pyrimidines (cytosine and uridine) in the sense strand contained 2′-O-Methyl bases (2′ O-Methyl C and 2′-O-Methyl U)
[0339] In the antisense strand, pyrimidines adjacent to(towards 5′ position) ribo A nucleoside were replaced with their corresponding 2-O-Methyl nucleosides
[0340] A two base dTsdT extension at 3′ end of both sense and anti sense sequences was introduced
[0341] The sequence file was converted to a text file to make it compatible for loading in the MerMade 192 synthesis software

### Synthesis, Cleavage and Deprotection:

[0342] The synthesis of CD274 sequences used solid supported oligonucleotide synthesis using phosphoramidite chemistry.

[0343] The synthesis of the above sequences was performed at 1 μm scale in 96 well plates. The amidite solutions were prepared at 0.1M concentration and ethyl thio tetrazole (0.6M in Acetonitrile) was used as activator.

[0344] The synthesized sequences were cleaved and deprotected in 96 well plates, using methylamine in the first step and fluoride reagent in the second step. The crude sequences were precipitated using acetone:ethanol (80:20) mix and the pellet were re-suspended in 0.02M sodium acetate buffer. Samples from each sequence were analyzed by LC-MS to confirm the identity, UV for quantification and a selected set of samples by IEX chromatography to determine purity.

### Purification and Desalting:

[0345] CD274 sequences were purified on AKTA explorer purification system using Source 15Q column. A column temperature of 65 C was maintained during purification. Sample injection and collection was performed in 96 well (1.8 mL-deep well) plates. A single peak corresponding to the full length sequence was collected in the eluent. The purified sequences were desalted on a Sephadex G25 column using AKTA purifier. The desalted CD274 sequences were analyzed for concentration (by UV measurement at A260) and purity (by ion exchange HPLC). The single strands were then submitted for annealing.

### In Vitro Screening:

### Cell Culture and Transfections:

[0346] RKO or Hep3B (ATCC, Manassas, VA) cells were grown to near confluence at 37° C. in an atmosphere of 5% CO₂ in McCoy's or EMEM (respectively) (ATCC) supplemented with 10% FBS, streptomycin, and glutamine (ATCC) before being released from the plate by trypsinization. Reverse transfection was carried out by adding 5pl of Opti-MEM to 5pl of siRNA duplexes per well into a 96-well plate along with 10pl of Opti-MEM plus 0.2pl of Lipofectamine RNAiMax per well (Invitrogen, Carlsbad CA. cat #13778-150) and incubated at room temperature for 15 minutes. 80pl of complete growth media without antibiotic containing 2.0×10⁴ Hela cells were then added. Cells were incubated for 24 hours prior to RNA purification. Experiments were performed at 0.1 or 10 nM final duplex concentration for single dose screens with each of the CD274 duplexes. A subset of 16 duplexes that showed robust silencing in the 10 nM and 0.1 nM screens were assayed over a range of concentrations from 10 nM to 10 fM using serial dilutions to determine their IC50.

### Total RNA Isolation Using MagMAX-96 Total RNA Isolation Kit (Applied Biosystem, Forer City CA, Part #: AM1830):

[0347] Cells were harvested and lysed in 140pl of Lysis/Binding Solution then mixed for 1 minute at 850 rpm using and Eppendorf Thermomixer (the mixing speed was the same throughout the process). Twenty micro liters of magnetic beads and Lysis/Binding Enhancer mixture were added into cell-lysate and mixed for 5 minutes. Magnetic beads were captured using magnetic stand and the supernatant was removed without disturbing the beads. After removing supernatant, magnetic beads were washed with Wash Solution 1 (isopropanol added) and mixed for 1 minute. Beads were capture again and supernatant removed. Beads were then washed with 150pl Wash Solution 2 (Ethanol added), captured and supernatant was removed. 50 ul of DNase mixture (MagMax turbo DNase Buffer and Turbo DNase) was then added to the beads and they were mixed for 10 to 15 minutes. After mixing, 100 μl of RNA Rebinding Solution was added and mixed for 3 minutes. Supernatant was removed and magnetic beads were washed again with 150 μl Wash Solution 2 and mixed for 1 minute and supernatant was removed completely. The magnetic beads were mixed for 2 minutes to dry before RNA was eluted with 50 μl of water.

cDNA Synthesis Using ABI High Capacity cDNA Reverse Transcription Kit (Applied Biosystems, Foster City, CA, Cat #4368813):

[0348] A master mix of 2 μl 10× Buffer, 0.8 μl 25×dNTPs, 2 μl Random primers, 1 μl Reverse Transcriptase, 1 μl RNase inhibitor and 3.2 μl of H2O per reaction were added into 10 μl total RNA. cDNA was generated using a Bio-Rad C-1000 or S-1000 thermal cycler (Hercules, CA) through the following steps: 25° C. 10 min, 37° C. 120 min, 85° C. 5 sec, 4° C. hold.

### Real Time PCR:

[0349] 2 μl of cDNA were added to a master mix containing 0.5 μl GAPDH TaqMan Probe (Applied Biosystems Cat #4326317E), 0.5 μl CD274 (PD-Li) TaqMan probe (Applied Biosystems cat #Hs01125301_m1) and 5 μl Roche Probes Master Mix (Roche Cat #04887301001) in a total of 10 μl per well in a LightCycler 480 384 well plate (Roche cat #0472974001). Real time PCR was done in a LightCycler 480 Real Time PCR machine (Roche). Each duplex was tested in at least two independent transfections. For those siRNAs that were tested in RKO and Hep3B cells, at least three transfections were performed. Each transfection was assayed by qPCR in duplicate.

[0350] Real time data were analyzed using the ΔΔCt method. Each sample was normalized to GAPDH expression and knockdown was assessed relative to cells transfected with the non-targeting duplex AD-1955. IC50s were defined using a 4 parameter fit model in XLfit.

[0351] In the experiments described herein, IC50 values were determined for a set of exemplary inhibitory duplex sequences in duplicate experiments. For example, IC50 values for inhibitory duplex AD-31066-bl (SEQ ID NO: 890 and SEQ ID NO: 914), were 0.456978463 nM and 0.817398666 nM; for inhibitory duplex AD-31067-bl (SEQ ID NO: 891 and SEQ ID NO: 915), 0.612976729 nM and 2.901972117 nM; for inhibitory duplex AD-31068-bl (SEQ ID NO: 892 and SEQ ID NO: 915), 0.762691728 nM and 0.46079339 nM; and for inhibitory duplex AD-31069-bl (SEQ ID NO: 893 and SEQ ID NO: 915), 0.30630503 nM and 0.261020215 nM.

[0352] Other embodiments are in the claims.

TABLE 2
Human CD274/PD-L1 Sing1e Strands
and Duplex Sequences

| | | Position of | |
|---|---|---|---|
| | | 5′ base on | |
| | strand ID | transcript | |
| Seq | (S = sense; | NM_014143.2 | |
| ID | AS = | (SEQ ID | |
| No. | antisense) | NO: 869) | Sequence (5′ to 3′) |
| 5 | S | 415 | CGACUACAAGCGAAUUACU |
| 6 | AS | 415 | AGUAAUUCGCUUGUAGUCG |
| 7 | S | 1236 | UCCUAGGAAGACGGGUUGA |
| 8 | AS | 1236 | UCAACCCGUCUUCCUAGGA |
| 9 | S | 411 | GUGCCGACUACAAGCGAAU |
| 10 | AS | 411 | AUUCGCUUGUAGUCGGCAC |
| 11 | S | 414 | CCGACUACAAGCGAAUUAC |
| 12 | AS | 414 | GUAAUUCGCUUGUAGUCGG |
| 13 | S | 413 | GCCGACUACAAGCGAAUUA |
| 14 | AS | 413 | UAAUUCGCUUGUAGUCGGC |
| 15 | S | 973 | GUUUAGGGGUUCAUCGGGG |
| 16 | AS | 973 | CCCCGAUGAACCCCUAAAC |
| 17 | S | 1462 | GAUGUUACAAUUUUGUCGC |
| 18 | AS | 1462 | GCGACAAAAUUGUAACAUC |
| 19 | S | 104 | GCAUUUACUGUCACGGUUC |
| 20 | AS | 104 | GAACCGUGACAGUAAAUGC |
| 21 | S | 786 | GAGCCAUCUUAUUAUGCCU |
| 22 | AS | 786 | AGGCAUAAUAAGAUGGCUC |
| 23 | S | 1338 | AGUCUCAGUGUUGGAACGG |
| 24 | AS | 1338 | CCGUUCCAACACUGAGACU |
| 25 | S | 681 | CUUUUAGGAGAUUAGAUCC |
| 26 | AS | 681 | GGAUCUAAUCUCCUAAAAG |
| 27 | S | 1067 | AUGGAACCUGGCGAAAGCA |
| 28 | AS | 1067 | UGCUUUCGCCAGGUUCCAU |
| 29 | S | 529 | CUACCCCAAGGCCGAAGUC |
| 30 | AS | 529 | GACUUCGGCCUUGGGGUAG |
| 31 | S | 1068 | UGGAACCUGGCGAAAGCAG |
| 32 | AS | 1068 | CUGCUUUCGCCAGGUUCCA |
| 33 | S | 134 | UAUGUGGUAGAGUAUGGUA |
| 34 | AS | 134 | UACCAUACUCUACCACAUA |
| 35 | S | 723 | UGGUCAUCCCAGAACUACC |
| 36 | AS | 723 | GGUAGUUCUGGGAUGACCA |
| 37 | S | 105 | CAUUUACUGUCACGGUUCC |
| 38 | AS | 105 | GGAACCGUGACAGUAAAUG |
| 39 | S | 785 | GGAGCCAUCUUAUUAUGCC |
| 40 | AS | 785 | GGCAUAAUAAGAUGGCUCC |
| 41 | S | 416 | GACUACAAGCGAAUUACUG |
| 42 | AS | 416 | CAGUAAUUCGCUUGUAGUC |
| 43 | S | 710 | CAUACAGCUGAAUUGGUCA |
| 44 | AS | 710 | UGACCAAUUCAGCUGUAUG |
| 45 | S | 206 | GCACUAAUUGUCUAUUGGG |
| 46 | AS | 206 | CCCAAUAGACAAUUAGUGC |
| 47 | S | 974 | UUUAGGGGUUCAUCGGGGC |
| 48 | AS | 974 | GCCCCGAUGAACCCCUAAA |
| 49 | S | 962 | CUCAACCUGUGGUUUAGGG |
| 50 | AS | 962 | CCCUAAACCACAGGUUGAG |
| 51 | S | 1260 | CCUAAUUUGAGGGUCAGUU |
| 52 | AS | 1260 | AACUGACCCUCAAAUUAGG |
| 53 | S | 961 | UCUCAACCUGUGGUUUAGG |
| 54 | AS | 961 | CCUAAACCACAGGUUGAGA |
| 55 | S | 683 | UUUAGGAGAUUAGAUCCUG |
| 56 | AS | 683 | CAGGAUCUAAUCUCCUAAA |
| 57 | S | 1226 | CCAUUGCUCAUCCUAGGAA |
| 58 | AS | 1226 | UUCCUAGGAUGAGCAAUGG |
| 59 | S | 122 | CCCAAGGACCUAUAUGUGG |
| 60 | AS | 122 | CCACAUAUAGGUCCUUGGG |
| 61 | S | 1245 | GACGGGUUGAGAAUCCCUA |
| 62 | AS | 1245 | UAGGGAUUCUCAACCCGUC |
| 63 | S | 203 | GCUGCACUAAUUGUCUAUU |
| 64 | AS | 203 | AAUAGACAAUUAGUGCAGC |
| 65 | S | 108 | UUACUGUCACGGUUCCCAA |
| 66 | AS | 108 | UUGGGAACCGUGACAGUAA |
| 67 | S | 722 | UUGGUCAUCCCAGAACUAC |
| 68 | AS | 722 | GUAGUUCUGGGAUGACCAA |
| 69 | S | 408 | GUGGUGCCGACUACAAGCG |
| 70 | AS | 408 | CGCUUGUAGUCGGCACCAC |
| 71 | S | 1020 | CCGUGGGAUGCAGGCAAUG |
| 72 | AS | 1020 | CAUUGCCUGCAUCCCACGG |
| 73 | S | 789 | CCAUCUUAUUAUGCCUUGG |
| 74 | AS | 789 | CCAAGGCAUAAUAAGAUGG |
| 75 | S | 99 | UGAACGCAUUUACUGUCAC |
| 76 | AS | 99 | GUGACAGUAAAUGCGUUCA |
| 77 | S | 806 | GGUGUAGCACUGACAUUCA |
| 78 | AS | 806 | UGAAUGUCAGUGCUACACC |
| 79 | S | 98 | CUGAACGCAUUUACUGUCA |
| 80 | AS | 98 | UGACAGUAAAUGCGUUCAG |
| 81 | S | 124 | CAAGGACCUAUAUGUGGUA |
| 82 | AS | 124 | UACCACAUAUAGGUCCUUG |
| 83 | S | 1132 | GAGACCUUGAUACUUUCAA |
| 84 | AS | 1132 | UUGAAAGUAUCAAGGUCUC |
| 85 | S | 989 | GGGCUGAGCGUGACAAGAG |
| 86 | AS | 989 | CUCUUGUCACGCUCAGCCC |
| 87 | S | 404 | UAUGGUGGUGCCGACUACA |
| 88 | AS | 404 | UGUAGUCGGCACCACCAUA |
| 89 | S | 275 | AAGGUUCAGCAUAGUAGCU |
| 90 | AS | 275 | AGCUACUAUGCUGAACCUU |
| 91 | S | 1235 | AUCCUAGGAAGACGGGUUG |
| 92 | AS | 1235 | CAACCCGUCUUCCUAGGAU |
| 93 | S | 1463 | AUGUUACAAUUUUGUCGCC |
| 94 | AS | 1463 | GGCGACAAAAUUGUAACAU |
| 95 | S | 106 | AUUUACUGUCACGGUUCCC |
| 96 | AS | 106 | GGGAACCGUGACAGUAAAU |
| 97 | S | 103 | CGCAUUUACUGUCACGGUU |
| 98 | AS | 103 | AACCGUGACAGUAAAUGCG |
| 99 | S | 276 | AGGUUCAGCAUAGUAGCUA |
| 100 | AS | 276 | UAGCUACUAUGCUGAACCU |
| 101 | S | 11 | CACCAGCCGCGCUUCUGUC |
| 102 | AS | 11 | GACAGAAGCGCGGCUGGUG |
| 103 | S | 18 | CGCGCUUCUGUCCGCCUGC |
| 104 | AS | 18 | GCAGGCGGACAGAAGCGCG |
| 105 | S | 50 | AAGAUGAGGAUAUUUGCUG |
| 106 | AS | 50 | CAGCAAAUAUCCUCAUCUU |
| 107 | S | 70 | CUUUAUAUUCAUGACCUAC |
| 108 | AS | 70 | GUAGGUCAUGAAUAUAAAG |
| 109 | S | 76 | AUUCAUGACCUACUGGCAU |
| 110 | AS | 76 | AUGCCAGUAGGUCAUGAAU |
| 111 | S | 78 | UCAUGACCUACUGGCAUUU |
| 112 | AS | 78 | AAAUGCCAGUAGGUCAUGA |
| 113 | S | 86 | UACUGGCAUUUGCUGAACG |
| 114 | AS | 86 | CGUUCAGCAAAUGCCAGUA |
| 115 | S | 88 | CUGGCAUUUGCUGAACGCA |
| 116 | AS | 88 | UGCGUUCAGCAAAUGCCAG |
| 117 | S | 93 | AUUUGCUGAACGCAUUUAC |
| 118 | AS | 93 | GUAAAUGCGUUCAGCAAAU |
| 119 | S | 94 | UUUGCUGAACGCAUUUACU |
| 120 | AS | 94 | AGUAAAUGCGUUCAGCAAA |
| 121 | S | 97 | GCUGAACGCAUUUACUGUC |
| 122 | AS | 97 | GACAGUAAAUGCGUUCAGC |
| 123 | S | 107 | UUUACUGUCACGGUUCCCA |
| 124 | AS | 107 | UGGGAACCGUGACAGUAAA |
| 125 | S | 116 | ACGGUUCCCAAGGACCUAU |
| 126 | AS | 116 | AUAGGUCCUUGGGAACCGU |
| 127 | S | 117 | CGGUUCCCAAGGACCUAUA |
| 128 | AS | 117 | UAUAGGUCCUUGGGAACCG |
| 129 | S | 118 | GGUUCCCAAGGACCUAUAU |
| 130 | AS | 118 | AUAUAGGUCCUUGGGAACC |
| 131 | S | 119 | GUUCCCAAGGACCUAUAUG |
| 132 | AS | 119 | CAUAUAGGUCCUUGGGAAC |
| 133 | S | 128 | GACCUAUAUGUGGUAGAGU |
| 134 | AS | 128 | ACUCUACCACAUAUAGGUC |
| 135 | S | 138 | UGGUAGAGUAUGGUAGCAA |
| 136 | AS | 138 | UUGCUACCAUACUCUACCA |
| 137 | S | 145 | GUAUGGUAGCAAUAUGACA |
| 138 | AS | 145 | UGUCAUAUUGCUACCAUAC |
| 139 | S | 148 | UGGUAGCAAUAUGACAAUU |
| 140 | AS | 148 | AAUUGUCAUAUUGCUACCA |
| 141 | S | 149 | GGUAGCAAUAUGACAAUUG |
| 142 | AS | 149 | CAAUUGUCAUAUUGCUACC |
| 143 | S | 152 | AGCAAUAUGACAAUUGAAU |
| 144 | AS | 152 | AUUCAAUUGUCAUAUUGCU |
| 145 | S | 154 | CAAUAUGACAAUUGAAUGC |
| 146 | AS | 154 | GCAUUCAAUUGUCAUAUUG |
| 147 | S | 155 | AAUAUGACAAUUGAAUGCA |
| 148 | AS | 155 | UGCAUUCAAUUGUCAUAUU |
| 149 | S | 156 | AUAUGACAAUUGAAUGCAA |
| 150 | AS | 156 | UUGCAUUCAAUUGUCAUAU |
| 151 | S | 162 | CAAUUGAAUGCAAAUUCCC |
| 152 | AS | 162 | GGGAAUUUGCAUUCAAUUG |
| 153 | S | 166 | UGAAUGCAAAUUCCCAGUA |
| 154 | AS | 166 | UACUGGGAAUUUGCAUUCA |
| 155 | S | 168 | AAUGCAAAUUCCCAGUAGA |
| 156 | AS | 168 | UCUACUGGGAAUUUGCAUU |
| 157 | S | 187 | AAAACAAUUAGACCUGGCU |
| 158 | AS | 187 | AGCCAGGUCUAAUUGUUUU |
| 159 | S | 188 | AAACAAUUAGACCUGGCUG |
| 160 | AS | 188 | CAGCCAGGUCUAAUUGUUU |
| 161 | S | 202 | GGCUGCACUAAUUGUCUAU |
| 162 | AS | 202 | AUAGACAAUUAGUGCAGCC |
| 163 | S | 205 | UGCACUAAUUGUCUAUUGG |
| 164 | AS | 205 | CCAAUAGACAAUUAGUGCA |
| 165 | S | 218 | UAUUGGGAAAUGGAGGAUA |
| 166 | AS | 218 | UAUCCUCCAUUUCCCAAUA |
| 167 | S | 248 | CAAUUUGUGCAUGGAGAGG |
| 168 | AS | 248 | CCUCUCCAUGCACAAAUUG |
| 169 | S | 271 | CCUGAAGGUUCAGCAUAGU |
| 170 | AS | 271 | ACUAUGCUGAACCUUCAGG |
| 171 | S | 273 | UGAAGGUUCAGCAUAGUAG |
| 172 | AS | 273 | CUACUAUGCUGAACCUUCA |
| 173 | S | 277 | GGUUCAGCAUAGUAGCUAC |
| 174 | AS | 277 | GUAGCUACUAUGCUGAACC |
| 175 | S | 278 | GUUCAGCAUAGUAGCUACA |
| 176 | AS | 278 | UGUAGCUACUAUGCUGAAC |
| 177 | S | 279 | UUCAGCAUAGUAGCUACAG |
| 178 | AS | 279 | CUGUAGCUACUAUGCUGAA |
| 179 | S | 284 | CAUAGUAGCUACAGACAGA |
| 180 | AS | 284 | UCUGUCUGUAGCUACUAUG |
| 181 | S | 285 | AUAGUAGCUACAGACAGAG |
| 182 | AS | 285 | CUCUGUCUGUAGCUACUAU |
| 183 | S | 292 | CUACAGACAGAGGGCCCGG |
| 184 | AS | 292 | CCGGGCCCUCUGUCUGUAG |
| 185 | S | 341 | GCUGCACUUCAGAUCACAG |
| 186 | AS | 341 | CUGUGAUCUGAAGUGCAGC |
| 187 | S | 342 | CUGCACUUCAGAUCACAGA |
| 188 | AS | 342 | UCUGUGAUCUGAAGUGCAG |
| 189 | S | 343 | UGCACUUCAGAUCACAGAU |
| 190 | AS | 343 | AUCUGUGAUCUGAAGUGCA |
| 191 | S | 344 | GCACUUCAGAUCACAGAUG |
| 192 | AS | 344 | CAUCUGUGAUCUGAAGUGC |
| 193 | S | 365 | AAAUUGCAGGAUGCAGGGG |
| 194 | AS | 365 | CCCCUGCAUCCUGCAAUUU |
| 195 | S | 371 | CAGGAUGCAGGGGUGUACC |
| 196 | AS | 371 | GGUACACCCCUGCAUCCUG |
| 197 | S | 373 | GGAUGCAGGGGUGUACCGC |
| 198 | AS | 373 | GCGGUACACCCCUGCAUCC |
| 199 | S | 385 | GUACCGCUGCAUGAUCAGC |
| 200 | AS | 385 | GCUGAUCAUGCAGCGGUAC |
| 201 | S | 387 | ACCGCUGCAUGAUCAGCUA |
| 202 | AS | 387 | UAGCUGAUCAUGCAGCGGU |
| 203 | S | 395 | AUGAUCAGCUAUGGUGGUG |
| 204 | AS | 395 | CACCACCAUAGCUGAUCAU |
| 205 | S | 402 | GCUAUGGUGGUGCCGACUA |
| 206 | AS | 402 | UAGUCGGCACCACCAUAGC |
| 207 | S | 412 | UGCCGACUACAAGCGAAUU |
| 208 | AS | 412 | AAUUCGCUUGUAGUCGGCA |
| 209 | S | 423 | AGCGAAUUACUGUGAAAGU |
| 210 | AS | 423 | ACUUUCACAGUAAUUCGCU |
| 211 | S | 424 | GCGAAUUACUGUGAAAGUC |
| 212 | AS | 424 | GACUUUCACAGUAAUUCGC |
| 213 | S | 425 | CGAAUUACUGUGAAAGUCA |
| 214 | AS | 425 | UGACUUUCACAGUAAUUCG |
| 215 | S | 428 | AUUACUGUGAAAGUCAAUG |
| 216 | AS | 428 | CAUUGACUUUCACAGUAAU |
| 217 | S | 430 | UACUGUGAAAGUCAAUGCC |
| 218 | AS | 430 | GGCAUUGACUUUCACAGUA |
| 219 | S | 437 | AAAGUCAAUGCCCCAUACA |
| 220 | AS | 437 | UGUAUGGGGCAUUGACUUU |
| 221 | S | 440 | GUCAAUGCCCCAUACAACA |
| 222 | AS | 440 | UGUUGUAUGGGGCAUUGAC |
| 223 | S | 472 | AAUUUUGGUUGUGGAUCCA |
| 224 | AS | 472 | UGGAUCCACAACCAAAAUU |
| 225 | S | 473 | AUUUUGGUUGUGGAUCCAG |
| 226 | AS | 473 | CUGGAUCCACAACCAAAAU |
| 227 | S | 490 | AGUCACCUCUGAACAUGAA |
| 228 | AS | 490 | UUCAUGUUCAGAGGUGACU |
| 229 | S | 494 | ACCUCUGAACAUGAACUGA |
| 230 | AS | 494 | UCAGUUCAUGUUCAGAGGU |
| 231 | S | 495 | CCUCUGAACAUGAACUGAC |
| 232 | AS | 495 | GUCAGUUCAUGUUCAGAGG |
| 233 | S | 499 | UGAACAUGAACUGACAUGU |
| 234 | AS | 499 | ACAUGUCAGUUCAUGUUCA |
| 235 | S | 502 | ACAUGAACUGACAUGUCAG |
| 236 | AS | 502 | CUGACAUGUCAGUUCAUGU |
| 237 | S | 503 | CAUGAACUGACAUGUCAGG |
| 238 | AS | 503 | CCUGACAUGUCAGUUCAUG |
| 239 | S | 505 | UGAACUGACAUGUCAGGCU |
| 240 | AS | 505 | AGCCUGACAUGUCAGUUCA |
| 241 | S | 506 | GAACUGACAUGUCAGGCUG |
| 242 | AS | 506 | CAGCCUGACAUGUCAGUUC |
| 243 | S | 511 | GACAUGUCAGGCUGAGGGC |
| 244 | AS | 511 | GCCCUCAGCCUGACAUGUC |
| 245 | S | 515 | UGUCAGGCUGAGGGCUACC |
| 246 | AS | 515 | GGUAGCCCUCAGCCUGACA |
| 247 | S | 530 | UACCCCAAGGCCGAAGUCA |
| 248 | AS | 530 | UGACUUCGGCCUUGGGGUA |
| 249 | S | 536 | AAGGCCGAAGUCAUCUGGA |
| 250 | AS | 536 | UCCAGAUGACUUCGGCCUU |
| 251 | S | 541 | CGAAGUCAUCUGGACAAGC |
| 252 | AS | 541 | GCUUGUCCAGAUGACUUCG |
| 253 | S | 547 | CAUCUGGACAAGCAGUGAC |
| 254 | AS | 547 | GUCACUGCUUGUCCAGAUG |
| 255 | S | 557 | AGCAGUGACCAUCAAGUCC |
| 256 | AS | 557 | GGACUUGAUGGUCACUGCU |
| 257 | S | 568 | UCAAGUCCUGAGUGGUAAG |
| 258 | AS | 568 | CUUACCACUCAGGACUUGA |
| 259 | S | 645 | GAAUCAACACAACAACUAA |
| 260 | AS | 645 | UUAGUUGUUGUGUUGAUUC |
| 261 | S | 646 | AAUCAACACAACAACUAAU |
| 262 | AS | 646 | AUUAGUUGUUGUGUUGAUU |
| 263 | S | 671 | UUCUACUGCACUUUUAGGA |
| 264 | AS | 671 | UCCUAAAAGUGCAGUAGAA |
| 265 | S | 678 | GCACUUUUAGGAGAUUAGA |
| 266 | AS | 678 | UCUAAUCUCCUAAAAGUGC |
| 267 | S | 682 | UUUUAGGAGAUUAGAUCCU |
| 268 | AS | 682 | AGGAUCUAAUCUCCUAAAA |
| 269 | S | 684 | UUAGGAGAUUAGAUCCUGA |
| 270 | AS | 684 | UCAGGAUCUAAUCUCCUAA |
| 271 | S | 685 | UAGGAGAUUAGAUCCUGAG |
| 272 | AS | 685 | CUCAGGAUCUAAUCUCCUA |
| 273 | S | 686 | AGGAGAUUAGAUCCUGAGG |
| 274 | AS | 686 | CCUCAGGAUCUAAUCUCCU |
| 275 | S | 687 | GGAGAUUAGAUCCUGAGGA |
| 276 | AS | 687 | UCCUCAGGAUCUAAUCUCC |
| 277 | S | 706 | AAACCAUACAGCUGAAUUG |
| 278 | AS | 706 | CAAUUCAGCUGUAUGGUUU |
| 279 | S | 707 | AACCAUACAGCUGAAUUGG |
| 280 | AS | 707 | CCAAUUCAGCUGUAUGGUU |
| 281 | S | 709 | CCAUACAGCUGAAUUGGUC |
| 282 | AS | 709 | GACCAAUUCAGCUGUAUGG |
| 283 | S | 711 | AUACAGCUGAAUUGGUCAU |
| 284 | AS | 711 | AUGACCAAUUCAGCUGUAU |
| 285 | S | 716 | GCUGAAUUGGUCAUCCCAG |
| 286 | AS | 716 | CUGGGAUGACCAAUUCAGC |
| 287 | S | 724 | GGUCAUCCCAGAACUACCU |
| 288 | AS | 724 | AGGUAGUUCUGGGAUGACC |
| 289 | S | 744 | UGGCACAUCCUCCAAAUGA |
| 290 | AS | 744 | UCAUUUGGAGGAUGUGCCA |
| 291 | S | 760 | UGAAAGGACUCACUUGGUA |
| 292 | AS | 760 | UACCAAGUGAGUCCUUUCA |
| 293 | S | 764 | AGGACUCACUUGGUAAUUC |
| 294 | AS | 764 | GAAUUACCAAGUGAGUCCU |
| 295 | S | 766 | GACUCACUUGGUAAUUCUG |
| 296 | AS | 766 | CAGAAUUACCAAGUGAGUC |
| 297 | S | 769 | UCACUUGGUAAUUCUGGGA |
| 298 | AS | 769 | UCCCAGAAUUACCAAGUGA |
| 299 | S | 775 | GGUAAUUCUGGGAGCCAUC |
| 300 | AS | 775 | GAUGGCUCCCAGAAUUACC |
| 301 | S | 776 | GUAAUUCUGGGAGCCAUCU |
| 302 | AS | 776 | AGAUGGCUCCCAGAAUUAC |
| 303 | S | 781 | UCUGGGAGCCAUCUUAUUA |
| 304 | AS | 781 | UAAUAAGAUGGCUCCCAGA |
| 305 | S | 782 | CUGGGAGCCAUCUUAUUAU |
| 306 | AS | 782 | AUAAUAAGAUGGCUCCCAG |
| 307 | S | 783 | UGGGAGCCAUCUUAUUAUG |
| 308 | AS | 783 | CAUAAUAAGAUGGCUCCCA |
| 309 | S | 784 | GGGAGCCAUCUUAUUAUGC |
| 310 | AS | 784 | GCAUAAUAAGAUGGCUCCC |
| 311 | S | 787 | AGCCAUCUUAUUAUGCCUU |
| 312 | AS | 787 | AAGGCAUAAUAAGAUGGCU |
| 313 | S | 791 | AUCUUAUUAUGCCUUGGUG |
| 314 | AS | 791 | CACCAAGGCAUAAUAAGAU |
| 315 | S | 795 | UAUUAUGCCUUGGUGUAGC |
| 316 | AS | 795 | GCUACACCAAGGCAUAAUA |
| 317 | S | 796 | AUUAUGCCUUGGUGUAGCA |
| 318 | AS | 796 | UGCUACACCAAGGCAUAAU |
| 319 | S | 800 | UGCCUUGGUGUAGCACUGA |
| 320 | AS | 800 | UCAGUGCUACACCAAGGCA |
| 321 | S | 805 | UGGUGUAGCACUGACAUUC |
| 322 | AS | 805 | GAAUGUCAGUGCUACACCA |
| 323 | S | 809 | GUAGCACUGACAUUCAUCU |
| 324 | AS | 809 | AGAUGAAUGUCAGUGCUAC |
| 325 | S | 815 | CUGACAUUCAUCUUCCGUU |
| 326 | AS | 815 | AACGGAAGAUGAAUGUCAG |
| 327 | S | 841 | AGGGAGAAUGAUGGAUGUG |
| 328 | AS | 841 | CACAUCCAUCAUUCUCCCU |
| 329 | S | 868 | UGGCAUCCAAGAUACAAAC |
| 330 | AS | 868 | GUUUGUAUCUUGGAUGCCA |
| 331 | S | 869 | GGCAUCCAAGAUACAAACU |
| 332 | AS | 869 | AGUUUGUAUCUUGGAUGCC |
| 333 | S | 870 | GCAUCCAAGAUACAAACUC |
| 334 | AS | 870 | GAGUUUGUAUCUUGGAUGC |
| 335 | S | 896 | CAAAGUGAUACACAUUUGG |
| 336 | AS | 896 | CCAAAUGUGUAUCACUUUG |
| 337 | S | 900 | GUGAUACACAUUUGGAGGA |
| 338 | AS | 900 | UCCUCCAAAUGUGUAUCAC |
| 339 | S | 905 | ACACAUUUGGAGGAGACGU |
| 340 | AS | 905 | ACGUCUCCUCCAAAUGUGU |
| 341 | S | 907 | ACAUUUGGAGGAGACGUAA |
| 342 | AS | 907 | UUACGUCUCCUCCAAAUGU |
| 343 | S | 908 | CAUUUGGAGGAGACGUAAU |
| 344 | AS | 908 | AUUACGUCUCCUCCAAAUG |
| 345 | S | 913 | GGAGGAGACGUAAUCCAGC |
| 346 | AS | 913 | GCUGGAUUACGUCUCCUCC |
| 347 | S | 920 | ACGUAAUCCAGCAUUGGAA |
| 348 | AS | 920 | UUCCAAUGCUGGAUUACGU |
| 349 | S | 965 | AACCUGUGGUUUAGGGGUU |
| 350 | AS | 965 | AACCCCUAAACCACAGGUU |
| 351 | S | 967 | CCUGUGGUUUAGGGGUUCA |
| 352 | AS | 967 | UGAACCCCUAAACCACAGG |
| 353 | S | 968 | CUGUGGUUUAGGGGUUCAU |
| 354 | AS | 968 | AUGAACCCCUAAACCACAG |
| 355 | S | 971 | UGGUUUAGGGGUUCAUCGG |
| 356 | AS | 971 | CCGAUGAACCCCUAAACCA |
| 357 | S | 972 | GGUUUAGGGGUUCAUCGGG |
| 358 | AS | 972 | CCCGAUGAACCCCUAAACC |
| 359 | S | 1031 | AGGCAAUGUGGGACUUAAA |
| 360 | AS | 1031 | UUUAAGUCCCACAUUGCCU |
| 361 | S | 1032 | GGCAAUGUGGGACUUAAAA |
| 362 | AS | 1032 | UUUUAAGUCCCACAUUGCC |
| 363 | S | 1033 | GCAAUGUGGGACUUAAAAG |
| 364 | AS | 1033 | CUUUUAAGUCCCACAUUGC |
| 365 | S | 1062 | UGAAAAUGGAACCUGGCGA |
| 366 | AS | 1062 | UCGCCAGGUUCCAUUUUCA |
| 367 | S | 1064 | AAAAUGGAACCUGGCGAAA |
| 368 | AS | 1064 | UUUCGCCAGGUUCCAUUUU |
| 369 | S | 1128 | GAGGGAGACCUUGAUACUU |
| 370 | AS | 1128 | AAGUAUCAAGGUCUCCCUC |
| 371 | S | 1129 | AGGGAGACCUUGAUACUUU |
| 372 | AS | 1129 | AAAGUAUCAAGGUCUCCCU |
| 373 | S | 1133 | AGACCUUGAUACUUUCAAA |
| 374 | AS | 1133 | UUUGAAAGUAUCAAGGUCU |
| 375 | S | 1138 | UUGAUACUUUCAAAUGCCU |
| 376 | AS | 1138 | AGGCAUUUGAAAGUAUCAA |
| 377 | S | 1150 | AAUGCCUGAGGGGCUCAUC |
| 378 | AS | 1150 | GAUGAGCCCCUCAGGCAUU |
| 379 | S | 1152 | UGCCUGAGGGGCUCAUCGA |
| 380 | AS | 1152 | UCGAUGAGCCCCUCAGGCA |
| 381 | S | 1160 | GGGCUCAUCGACGCCUGUG |
| 382 | AS | 1160 | CACAGGCGUCGAUGAGCCC |
| 383 | S | 1161 | GGCUCAUCGACGCCUGUGA |
| 384 | AS | 1161 | UCACAGGCGUCGAUGAGCC |
| 385 | S | 1166 | AUCGACGCCUGUGACAGGG |
| 386 | AS | 1166 | CCCUGUCACAGGCGUCGAU |
| 387 | S | 1205 | AGGAGCCUCCAAGCAAAUC |
| 388 | AS | 1205 | GAUUUGCUUGGAGGCUCCU |
| 389 | S | 1224 | AUCCAUUGCUCAUCCUAGG |
| 390 | AS | 1224 | CCUAGGAUGAGCAAUGGAU |
| 391 | S | 1233 | UCAUCCUAGGAAGACGGGU |
| 392 | AS | 1233 | ACCCGUCUUCCUAGGAUGA |
| 393 | S | 1234 | CAUCCUAGGAAGACGGGUU |
| 394 | AS | 1234 | AACCCGUCUUCCUAGGAUG |
| 395 | S | 1238 | CUAGGAAGACGGGUUGAGA |
| 396 | AS | 1238 | UCUCAACCCGUCUUCCUAG |
| 397 | S | 1246 | ACGGGUUGAGAAUCCCUAA |
| 398 | AS | 1246 | UUAGGGAUUCUCAACCCGU |
| 399 | S | 1254 | AGAAUCCCUAAUUUGAGGG |
| 400 | AS | 1254 | CCCUCAAAUUAGGGAUUCU |
| 401 | S | 1256 | AAUCCCUAAUUUGAGGGUC |
| 402 | AS | 1256 | GACCCUCAAAUUAGGGAUU |
| 403 | S | 1259 | CCCUAAUUUGAGGGUCAGU |
| 404 | AS | 1259 | ACUGACCCUCAAAUUAGGG |
| 405 | S | 1302 | CACUCAAUGCCUCAAUUUG |
| 406 | AS | 1302 | CAAAUUGAGGCAUUGAGUG |
| 407 | S | 1303 | ACUCAAUGCCUCAAUUUGU |
| 408 | AS | 1303 | ACAAAUUGAGGCAUUGAGU |
| 409 | S | 1323 | UUCUGCAUGACUGAGAGUC |
| 410 | AS | 1323 | GACUCUCAGUCAUGCAGAA |
| 411 | S | 1324 | UCUGCAUGACUGAGAGUCU |
| 412 | AS | 1324 | AGACUCUCAGUCAUGCAGA |
| 413 | S | 1327 | GCAUGACUGAGAGUCUCAG |
| 414 | AS | 1327 | CUGAGACUCUCAGUCAUGC |
| 415 | S | 1331 | GACUGAGAGUCUCAGUGUU |
| 416 | AS | 1331 | AACACUGAGACUCUCAGUC |
| 417 | S | 1337 | GAGUCUCAGUGUUGGAACG |
| 418 | AS | 1337 | CGUUCCAACACUGAGACUC |
| 419 | S | 1341 | CUCAGUGUUGGAACGGGAC |
| 420 | AS | 1341 | GUCCCGUUCCAACACUGAG |
| 421 | S | 1386 | UUAUUUUGAGUCUGUGAGG |
| 422 | AS | 1386 | CCUCACAGACUCAAAAUAA |
| 423 | S | 1388 | AUUUUGAGUCUGUGAGGUC |
| 424 | AS | 1388 | GACCUCACAGACUCAAAAU |
| 425 | S | 1449 | AUAUAUUGUAGUAGAUGUU |
| 426 | AS | 1449 | AACAUCUACUACAAUAUAU |
| 427 | S | 1484 | ACUAAACUUGCUGCUUAAU |
| 428 | AS | 1484 | AUUAAGCAGCAAGUUUAGU |
| 429 | S | 1493 | GCUGCUUAAUGAUUUGCUC |
| 430 | AS | 1493 | GAGCAAAUCAUUAAGCAGC |
| 431 | S | 1498 | UUAAUGAUUUGCUCACAUC |
| 432 | AS | 1498 | GAUGUGAGCAAAUCAUUAA |
| 433 | S | 1511 | CACAUCUAGUAAAACAUGG |
| 434 | AS | 1511 | CCAUGUUUUACUAGAUGUG |
| 435 | S | 1516 | CUAGUAAAACAUGGAGUAU |
| 436 | AS | 1516 | AUACUCCAUGUUUUACUAG |

TABLE 3
Human CD274/PD-L1 Modified Sing1e Strands and Duplex Sequences

| SEQ | | | | |
|---|---|---|---|---|
| ID | | Single | | |
| NO: | Duplex | strand | Sequence | Oligo design name |
| 437 | AD-22303.1 | A-43007.1 | cGAcuAcAAGcGAAuuAcudTsdT | NM_014143.2_415-433s |
| 438 | | A-43008.1 | AGuAAUUCGCUUGuAGUCGdTsdT | NM_014143.2_415-433s |
| 439 | AD-22304.1 | A-43009.1 | uccuAGGAAGAcGGGuuGAdTsdT | NM_014143.2_1236-1254s |
| 440 | | A-43010.1 | UcAACCCGUCUUCCuAGGAdTsdT | NM_014143.2_1236-1254s |
| 441 | AD-22305.1 | A-43011.1 | GuGccGAcuAcAAGcGAAudTsdT | NM_014143.2_411-429s |
| 442 | | A-43012.1 | AUUCGCUUGuAGUCGGcACdTsdT | NM_014143.2_411-429s |
| 443 | AD-22306.1 | A-43013.1 | ccGAcuAcAAGcGAAuuAcdTsdT | NM_014143.2_414-432s |
| 444 | | A-43014.1 | GuAAUUCGCUUGuAGUCGGdTsdT | NM_014143.2_414-432s |
| 445 | AD-22307.1 | A-43015.1 | GccGAcuAcAAGcGAAuuAdTsdT | NM_014143.2_413-431s |
| 446 | | A-43016.1 | uAAUUCGCUUGuAGUCGGCdTsdT | NM_014143.2_413-431s |
| 447 | AD-22308.1 | A-43017.1 | GuuuAGGGGuucAucGGGGdTsdT | NM_014143.2_973-991s |
| 448 | | A-43018.1 | CCCCGAUGAACCCCuAAACdTsdT | NM_014143.2_973-991s |
| 449 | AD-22309.1 | A-43019.1 | GAuGuuAcAAuuuuGucGcdTsdT | NM_014143.2_1462-1480s |
| 450 | | A-43020.1 | GCGAcAAAAUUGuAAcAUCdTsdT | NM_014143.2_1462-1480s |
| 451 | AD-22310.1 | A-43021.1 | GcAuuuAcuGucAcGGuucdTsdT | NM_014143.2_104-122s |
| 452 | | A-43022.1 | GAACCGUGAcAGuAAAUGCdTsdT | NM_014143.2_104-122s |
| 453 | AD-22311.1 | A-43023.1 | GAGccAucuuAuuAuGccudTsdT | NM_014143.2_786-804s |
| 454 | | A-43024.1 | AGGcAuAAuAAGAUGGCUCdTsdT | NM_014143.2_786-804s |
| 455 | AD-22312.1 | A-43025.1 | AGucucAGuGuuGGAAcGGdTsdT | NM_014143.2_1338-1356s |
| 456 | | A-43026.1 | CCGUUCcAAcACUGAGACUdTsdT | NM_014143.2_1338-1356s |
| 457 | AD-22313.1 | A-43027.1 | cuuuuAGGAGAuuAGAuccdTsdT | NM_014143.2_681-699s |
| 458 | | A-43028.1 | GGAUCuAAUCUCCuAAAAGdTsdT | NM_014143.2_681-699s |
| 459 | AD-22314.1 | A-43029.1 | AuGGAAccuGGcGAAAGcAdTsdT | NM_014143.2_1067-1085s |
| 460 | | A-43030.1 | UGCUUUCGCcAGGUUCcAUdTsdT | NM_014143.2_1067-1085s |
| 461 | AD-22315.1 | A-43031.1 | cuAccccAAGGccGAAGucdTsdT | NM_014143.2_529-547s |
| 462 | | A-43032.1 | GACUUCGGCCUUGGGGuAGdTsdT | NM_014143.2_529-547s |
| 463 | AD-22316.1 | A-43033.1 | uGGAAccuGGcGAAAGcAGdTsdT | NM_014143.2_1068-1086s |
| 464 | | A-43034.1 | CUGCUUUCGCcAGGUUCcAdTsdT | NM_014143.2_1068-1086s |
| 465 | AD-22317.1 | A-43035.1 | uAuGuGGuAGAGuAuGGuAdTsdT | NM_014143.2_134-152s |
| 466 | | A-43036.1 | uACcAuACUCuACcAcAuAdTsdT | NM_014143.2_134-152s |
| 467 | AD-22318.1 | A-43037.1 | uGGucAucccAGAAcuAccdTsdT | NM_014143.2_723-741s |
| 468 | | A-43038.1 | GGuAGUUCUGGGAUGACcAdTsdT | NM_014143.2_723-741s |
| 469 | AD-22319.1 | A-43039.1 | cAuuuAcuGucAcGGuuccdTsdT | NM_014143.2_105-123s |
| 470 | | A-43040.1 | GGAACCGUGAcAGuAAAUGdTsdT | NM_014143.2_105-123s |
| 471 | AD-22320.1 | A-43041.1 | GGAGccAucuuAuuAuGccdTsdT | NM_014143.2_785-803s |
| 472 | | A-43042.1 | GGcAuAAuAAGAUGGCUCCdTsdT | NM_014143.2_785-803s |
| 473 | AD-22321.1 | A-43043.1 | GAcuAcAAGcGAAuuAcuGdTsdT | NM_014143.2_416-434s |
| 474 | | A-43044.1 | cAGuAAUUCGCUUGuAGUCdTsdT | NM_014143.2_416-434s |
| 475 | AD-22322.1 | A-43045.1 | cAuAcAGouGAAuuGGucAdTsdT | NM_014143.2_710-728s |
| 476 | | A-43046.1 | UGACcAAUUcAGCUGuAUGdTsdT | NM_014143.2_710-728s |
| 477 | AD-22323.1 | A-43047.1 | GcAcuAAuuGucuAuuGGGdTsdT | NM_014143.2_206-224s |
| 478 | | A-43048.1 | CCcAAuAGAcAAUuAGUGCdTsdT | NM_014143.2_206-224s |
| 479 | AD-22324.1 | A-43049.1 | uuuAGGGGuucAucGGGGcdTsdT | NM_014143.2_974-992s |
| 480 | | A-43050.1 | GCCCCGAUGAACCCCuAAAdTsdT | NM_014143.2_974-992s |
| 481 | AD-22325.1 | A-43051.1 | cucAAccuGuGGuuuAGGGdTsdT | NM_014143.2_962-980s |
| 482 | | A-43052.1 | CCCuAAACcAcAGGUUGAGdTsdT | NM_014143.2_962-980s |
| 483 | AD-22326.1 | A-43053.1 | ccuAAuuuGAGGGucAGuudTsdT | NM_014143.2_1260-1278s |
| | | | fagentsdT | |
| 484 | | A-43054.1 | AACUGACCCUcAAAUuAGGdTsdT | NM_014143.2_1260-1278s |
| 485 | AD-22327.1 | A-43055.1 | ucucAAccuGuGGuuuAGGdTsdT | NM_014143.2_961-979s |
| 486 | | A-43056.1 | CCuAAACcAcAGGUUGAGAdTsdT | NM_014143.2_961-979s |
| 487 | AD-22328.1 | A-43057.1 | uuuAGGAGAuuAGAuccuGdTsdT | NM_014143.2_683-701s |
| 488 | | A-43058.1 | cAGGAUCuAAUCUCCuAAAdTsdT | NM_014143.2_683-701s |
| 489 | AD-22329.1 | A-43059.1 | ccAuuGcucAuccuAGGAAdTsdT | NM_014143.2_1226-1244s |
| 490 | | A-43060.1 | UUCCuAGGAUGAGcAAUGGdTsdT | NM_014143.2_1226-1244s |
| 491 | AD-22330.1 | A-43061.1 | cccAAGGAccuAuAuGuGGdTsdT | NM_014143.2_122-140s |
| 492 | | A-43062.1 | CcAcAuAuAGGUCCUUGGGdTsdT | NM_014143.2_122-140s |
| 493 | AD-22331.1 | A-43063.1 | GAcGGGuuGAGAAucccuAdTsdT | NM_014143.2_1245-1263s |
| 494 | | A-43064.1 | uAGGGAUUCUcAACCCGUCdTsdT | NM_014143.2_1245-1263s |
| 495 | AD-22332.1 | A-43065.1 | GcuGcAcuAAuuGucuAuudTsdT | NM_014143.2_203-221s |
| 496 | | A-43066.1 | AAuAGAcAAUuAGUGcAGCdTsdT | NM_014143.2_203-221s |
| 497 | AD-22333.1 | A-43067.1 | uuAcuGucAcGGuucccAAdTsdT | NM_014143.2_108-126s |
| 498 | | A-43068.1 | UUGGGAACCGUGAcAGuAAdTsdT | NM_014143.2_108-126s |
| 499 | AD-22334.1 | A-43069.1 | uuGGucAucccAGAAcuAcdTsdT | NM_014143.2_722-740s |
| 500 | | A-43070.1 | GuAGUUCUGGGAUGACcAAdTsdT | NM_014143.2_722-740s |
| 501 | AD-22335.1 | A-43071.1 | GuGGuGccGAcuAcAAGcGdTsdT | NM_014143.2_408-426s |
| 502 | | A-43072.1 | CGCUUGuAGUCGGcACcACdTsdT | NM_014143.2_408-426s |
| 503 | AD-22336.1 | A-43073.1 | ccGuGGGAuGcAGGcAAuGdTsdT | NM_014143.2_1020-1038s |
| 504 | | A-43074.1 | cAUUGCCUGcAUCCcACGGdTsdT | NM_014143.2_1020-1038s |
| 505 | AD-22337.1 | A-43075.1 | ccAucuuAuuAuGccuuGGdTsdT | NM_014143.2_789-807s |
| 506 | | A-43076.1 | CcAAGGcAuAAuAAGAUGGdTsdT | NM_014143.2_789-807s |
| 507 | AD-22338.1 | A-43077.1 | uGAAcGcAuuuAcuGucAcdTsdT | NM_014143.2_99-117s |
| 508 | | A-43078.1 | GUGAcAGuAAAUGCGUUcAdTsdT | NM_014143.2_99-117s |
| 509 | AD-22339.1 | A-43079.1 | GGuGuAGcAcuGAcAuucAdTsdT | NM_014143.2_806-824s |
| 510 | | A-43080.1 | UGAAUGUcAGUGCuAcACCdTsdT | NM_014143.2_806-824s |
| 511 | AD-22340.1 | A-43081.1 | cuGAAcGcAuuuAcuGucAdTsdT | NM_014143.2_98-116s |
| 512 | | A-43082.1 | UGAcAGuAAAUGCGUUcAGdTsdT | NM_014143.2_98-116s |
| 513 | AD-22341.1 | A-43083.1 | cAAGGAccuAuAuGuGGuAdTsdT | NM_014143.2_124-142s |
| 514 | | A-43084.1 | uACcAcAuAuAGGUCCUUGdTsdT | NM_014143.2_124-142s |
| 515 | AD-22342.1 | A-43085.1 | GAGAccuuGAuAcuuucAAdTsdT | NM_014143.2_1132-1150s |
| 516 | | A-43086.1 | UUGAAAGuAUcAAGGUCUCdTsdT | NM_014143.2_1132-1150s |
| 517 | AD-22343.1 | A-43087.1 | GGGcuGAGcGuGAcAAGAGdTsdT | NM_014143.2_989-1007s |
| 518 | | A-43088.1 | CUCUUGUcACGCUcAGCCCdTsdT | NM_014143.2_989-1007s |
| 519 | AD-22344.1 | A-43089.1 | uAuGGuGGuGccGAcuAcAdTsdT | NM_014143.2_404-422s |
| 520 | | A-43090.1 | UGuAGUCGGcACcACcAuAdTsdT | NM_014143.2_404-422s |
| 521 | AD-22345.1 | A-43091.1 | AAGGuucAGcAuAGuAGcudTsdT | NM_014143.2_275-293s |
| 522 | | A-43092.1 | AGCuACuAUGCUGAACCUUdTsdT | NM_014143.2_275-293s |
| 523 | AD-22346.1 | A-43093.1 | AuccuAGGAAGAcGGGuuGdTsdT | NM_014143.2_1235-1253s |
| 524 | | A-43094.1 | cAACCCGUCUUCCuAGGAUdTsdT | NM_014143.2_1235-1253s |
| 525 | AD-22347.1 | A-43095.1 | AuGuuAcAAuuuuGucGccdTsdT | NM_014143.2_1463-1481s |
| 526 | | A-43096.1 | GGCGAcAAAAUUGuAAcAUdTsdT | NM_014143.2_1463-1481s |
| 527 | AD-22348.1 | A-43097.1 | AuuuAcuGucAcGGuucccdTsdT | NM_014143.2_106-124s |
| 528 | | A-43098.1 | GGGAACCGUGAcAGuAAAUdTsdT | NM_014143.2_106-124s |
| 529 | AD-22349.1 | A-43099.1 | cGcAuuuAcuGucAcGGuudTsdT | NM_014143.2_103-121s |
| 530 | | A-43100.1 | AACCGUGAcAGuAAAUGCGdTsdT | NM_014143.2_103-121s |
| 531 | AD-22350.1 | A-43101.1 | AGGuucAGcAuAGuAGcuAdTsdT | NM_014143.2_276-294s |
| 532 | | A-43102.1 | uAGCuACuAUGCUGAACCUdTsdT | NM_014143.2_276-294s |
| 533 | AD-24151.1 | A-54818.1 | cAccAGccGcGcuucuGucdTsdT | NM_014143.2_11-29s |
| 534 | | A-54819.1 | GAcAGAAGCGCGGCUGGUGdTsdT | NM_014143.2_11-29s |
| 535 | AD-24152.1 | A-54820.1 | cGcGcuucuGuccGccuGcdTsdT | NM_014143.2_18-36s |
| 536 | | A-54821.1 | GcAGGCGGAcAGAAGCGCGdTsdT | NM_014143.2_18-36s |
| 537 | AD-24153.1 | A-54822.1 | AAGAuGAGGAuAuuuGcuGdTsdT | NM_014143.2_50-68s |
| 538 | | A-54823.1 | cAGcAAAuAUCCUcAUCUUdTsdT | NM_014143.2_50-68s |
| 539 | AD-24154.1 | A-54824.1 | cuuuAuAuucAuGAccuAcdTsdT | NM_014143.2_70-88s |
| 540 | | A-54825.1 | GuAGGUcAUGAAuAuAAAGdTsdT | NM_014143.2_70-88s |
| 541 | AD-24155.1 | A-54826.1 | AuucAuGAccuAcuGGcAudTsdT | NM_014143.2_76-94s |
| 542 | | A-54827.1 | AUGCcAGuAGGUcAUGAAUdTsdT | NM_014143.2_76-94s |
| 543 | AD-24156.1 | A-54828.1 | ucAuGAccuAcuGGcAuuudTsdT | NM_014143.2_78-96s |
| 544 | | A-54829.1 | AAAUGCcAGuAGGUcAUGAdTsdT | NM_014143.2_78-96s |
| 545 | AD-24157.1 | A-54830.1 | uAcuGGcAuuuGcuGAAcGdTsdT | NM_014143.2_86-104s |
| 546 | | A-54831.1 | CGUUcAGcAAAUGCcAGuAdTsdT | NM_014143.2_86-104s |
| 547 | AD-24158.1 | A-54832.1 | cuGGcAuuuGcuGAAcGcAdTsdT | NM_014143.2_88-106s |
| 548 | | A-54833.1 | UGCGUUcAGcAAAUGCcAGdTsdT | NM_014143.2_88-106s |
| 549 | AD-24159.1 | A-54834.1 | AuuuGcuGAAcGcAuuuAcdTsdT | NM_014143.2_93-111s |
| 550 | | A-54835.1 | GuAAAUGCGUUcAGcAAAUdTsdT | NM_014143.2_93-111s |
| 551 | AD-24160.1 | A-54836.1 | uuuGcuGAAcGcAuuuAcudTsdT | NM_014143.2_94-112s |
| 552 | | A-54837.1 | AGuAAAUGCGUUcAGcAAAdTsdT | NM_014143.2_94-112s |
| 553 | AD-24161.1 | A-54838.1 | GcuGAAcGcAuuuAcuGucdTsdT | NM_014143.2_97-115s |
| 554 | | A-54839.1 | GAcAGuAAAUGCGUUcAGCdTsdT | NM_014143.2_97-115s |
| 555 | AD-24162.1 | A-54840.1 | uuuAcuGucAcGGuucccAdTsdT | NM_014143.2_107-125s |
| 556 | | A-54841.1 | UGGGAACCGUGAcAGuAAAdTsdT | NM_014143.2_107-125s |
| 557 | AD-24163.1 | A-54842.1 | AcGGuucccAAGGAccuAudTsdT | NM_014143.2_116-134s |
| 558 | | A-54843.1 | AuAGGUCCUUGGGAACCGUdTsdT | NM_014143.2_116-134s |
| 559 | AD-24164.1 | A-54844.1 | cGGuucccAAGGAccuAuAdTsdT | NM_014143.2_117-135s |
| 560 | | A-54845.1 | uAuAGGUCCUUGGGAACCGdTsdT | NM_014143.2_117-135s |
| 561 | AD-24165.1 | A-54846.1 | GGuucccAAGGAccuAuAudTsdT | NM_014143.2_118-136s |
| 562 | | A-54847.1 | AuAuAGGUCCUUGGGAACCdTsdT | NM_014143.2_118-136s |
| 563 | AD-24166.1 | A-54848.1 | GuucccAAGGAccuAuAuGdTsdT | NM_014143.2_119-137s |
| 564 | | A-54849.1 | cAuAuAGGUCCUUGGGAACdTsdT | NM_014143.2_119-137s |
| 565 | AD-24167.1 | A-54850.1 | GAccuAuAuGuGGuAGAGudTsdT | NM_014143.2_128-146s |
| 566 | | A-54851.1 | ACUCuACcAcAuAuAGGUCdTsdT | NM_014143.2_128-146s |
| 567 | AD-24168.1 | A-54852.1 | uGGuAGAGuAuGGuAGcAAdTsdT | NM_014143.2_138-156s |
| 568 | | A-54853.1 | UUGCuACcAuACUCuACcAdTsdT | NM_014143.2_138-156s |
| 569 | AD-24169.1 | A-54854.1 | GuAuGGuAGcAAuAuGAcAdTsdT | NM_014143.2_145-163s |
| 570 | | A-54855.1 | UGUcAuAUUGCuACcAuACdTsdT | NM_014143.2_145-163s |
| 571 | AD-24170.1 | A-54856.1 | uGGuAGcAAuAuGAcAAuudTsdT | NM_014143.2_148-166s |
| 572 | | A-54857.1 | AAUUGUcAuAUUGCuACcAdTsdT | NM_014143.2_148-166s |
| 573 | AD-24171.1 | A-54858.1 | GGuAGcAAuAuGAcAAuuGdTsdT | NM_014143.2_149-167s |
| 574 | | A-54859.1 | cAAUUGUcAuAUUGCuACCdTsdT | NM_014143.2_149-167s |
| 575 | AD-24172.1 | A-54860.1 | AGcAAuAuGAcAAuuGAAudTsdT | NM_014143.2_152-170s |
| 576 | | A-54861.1 | AUUcAAUUGUcAuAUUGCUdTsdT | NM_014143.2_152-170s |
| 577 | AD-24173.1 | A-54862.1 | cAAuAuGAcAAuuGAAuGcdTsdT | NM_014143.2_154-172s |
| 578 | | A-54863.1 | GcAUUcAAUUGUcAuAUUGdTsdT | NM_014143.2_154-172s |
| 579 | AD-24174.1 | A-54864.1 | AAuAuGAcAAuuGAAuGcAdTsdT | NM_014143.2_155-173s |
| 580 | | A-54865.1 | UGcAUUcAAUUGUcAuAUUdTsdT | NM_014143.2_155-173s |
| 581 | AD-24175.1 | A-54866.1 | AuAuGAcAAuuGAAuGcAAdTsdT | NM_014143.2_156-174s |
| 582 | | A-54867.1 | UUGcAUUcAAUUGUcAuAUdTsdT | NM_014143.2_156-174s |
| 583 | AD-24176.1 | A-54868.1 | cAAuuGAAuGcAAAuucccdTsdT | NM_014143.2_162-180s |
| 584 | | A-54869.1 | GGGAAUUUGcAUUcAAUUGdTsdT | NM_014143.2_162-180s |
| 585 | AD-24177.1 | A-54870.1 | uGAAuGcAAAuucccAGuAdTsdT | NM_014143.2_166-184s |
| 586 | | A-54871.1 | uACUGGGAAUUUGcAUUcAdTsdT | NM_014143.2_166-184s |
| 587 | AD-24178.1 | A-54872.1 | AAuGcAAAuucccAGuAGAdTsdT | NM_014143.2_168-186s |
| 588 | | A-54873.1 | UCuACUGGGAAUUUGcAUUdTsdT | NM_014143.2_168-186s |
| 589 | AD-24179.1 | A-54874.1 | AAAAcAAuuAGAccuGGcudTsdT | NM_014143.2_187-205s |
| 590 | | A-54875.1 | AGCcAGGUCuAAUUGUUUUdTsdT | NM_014143.2_187-205s |
| 591 | AD-24180.1 | A-54876.1 | AAAcAAuuAGAccuGGcuGdTsdT | NM_014143.2_188-206s |
| 592 | | A-54877.1 | cAGCcAGGUCuAAUUGUUUdTsdT | NM_014143.2_188-206s |
| 593 | AD-24181.1 | A-54878.1 | GGcuGcAcuAAuuGucuAudTsdT | NM_014143.2_202-220s |
| 594 | | A-54879.1 | AuAGAcAAUuAGUGcAGCCdTsdT | NM_014143.2_202-220s |
| 595 | AD-24182.1 | A-54880.1 | uGcAcuAAuuGucuAuuGGdTsdT | NM_014143.2_205-223s |
| 596 | | A-54881.1 | CcAAuAGAcAAUuAGUGcAdTsdT | NM_014143.2_205-223s |
| 597 | AD-24183.1 | A-54882.1 | uAuuGGGAAAuGGAGGAuAdTsdT | NM_014143.2_218-236s |
| 598 | | A-54883.1 | uAUCCUCcAUUUCCcAAuAdTsdT | NM_014143.2_218-236s |
| 599 | AD-24184.1 | A-54884.1 | cAAuuuGuGcAuGGAGAGGdTsdT | NM_014143.2_248-266s |
| 600 | | A-54885.1 | CCUCUCcAUGcAcAAAUUGdTsdT | NM_014143.2_248-266s |
| 601 | AD-24185.1 | A-54886.1 | ccuGAAGGuucAGcAuAGudTsdT | NM_014143.2_271-289s |
| 602 | | A-54887.1 | ACuAUGCUGAACCUUcAGGdTsdT | NM_014143.2_271-289s |
| 603 | AD-24186.1 | A-54888.1 | uGAAGGuucAGcAuAGuAGdTsdT | NM_014143.2_273-291s |
| 604 | | A-54889.1 | CuACuAUGCUGAACCUUcAdTsdT | NM_014143.2_273-291s |
| 605 | AD-24187.1 | A-54890.1 | GGuucAGcAuAGuAGcuAcdTsdT | NM_014143.2_277-295s |
| 606 | | A-54891.1 | GuAGCuACuAUGCUGAACCdTsdT | NM_014143.2_277-295s |
| 607 | AD-24188.1 | A-54892.1 | GuucAGcAuAGuAGcuAcAdTsdT | NM_014143.2_278-296s |
| 608 | | A-54893.1 | UGuAGCuACuAUGCUGAACdTsdT | NM_014143.2_278-296s |
| 609 | AD-24189.1 | A-54894.1 | uucAGcAuAGuAGcuAcAGdTsdT | NM_014143.2_279-297s |
| 610 | | A-54895.1 | CUGuAGCuACuAUGCUGAAdTsdT | NM_014143.2_279-297s |
| 611 | AD-24190.1 | A-54896.1 | cAuAGuAGcuAcAGAcAGAdTsdT | NM_014143.2_284-302s |
| 612 | | A-54897.1 | UCUGUCUGuAGCuACuAUGdTsdT | NM_014143.2_284-302s |
| 613 | AD-24191.1 | A-54898.1 | AuAGuAGcuAcAGAcAGAGdTsdT | NM_014143.2_285-303s |
| 614 | | A-54899.1 | CUCUGUCUGuAGCuACuAUdTsdT | NM_014143.2_285-303s |
| 615 | AD-24192.1 | A-54900.1 | cuAcAGAcAGAGGGcccGGdTsdT | NM_014143.2_292-310s |
| 616 | | A-54901.1 | CCGGGCCCUCUGUCUGuAGdTsdT | NM_014143.2_292-310s |
| 617 | AD-24193.1 | A-54902.1 | GcuGcAcuucAGAucAcAGdTsdT | NM_014143.2_341-359s |
| 618 | | A-54903.1 | CUGUGAUCUGAAGUGcAGCdTsdT | NM_014143.2_341-359s |
| 619 | AD-24194.1 | A-54904.1 | cuGcAcuucAGAucAcAGAdTsdT | NM_014143.2_342-360s |
| 620 | | A-54905.1 | UCUGUGAUCUGAAGUGcAGdTsdT | NM_014143.2_342-360s |
| 621 | AD-24195.1 | A-54906.1 | uGcAcuucAGAucAcAGAudTsdT | NM_014143.2_343-361s |
| 622 | | A-54907.1 | AUCUGUGAUCUGAAGUGcAdTsdT | NM_014143.2_343-361s |
| 623 | AD-24196.1 | A-54908.1 | GcAcuucAGAucAcAGAuGdTsdT | NM_014143.2_344-362s |
| 624 | | A-54909.1 | cAUCUGUGAUCUGAAGUGCdTsdT | NM_014143.2_344-362s |
| 625 | AD-24197.1 | A-54910.1 | AAAuuGcAGGAuGcAGGGGdTsdT | NM_014143.2_365-383s |
| 626 | | A-54911.1 | CCCCUGcAUCCUGcAAUUUdTsdT | NM_014143.2_365-383s |
| 627 | AD-24198.1 | A-54912.1 | cAGGAuGcAGGGGuGuAccdTsdT | NM_014143.2_371-389s |
| 628 | | A-54913.1 | GGuAcACCCCUGcAUCCUGdTsdT | NM_014143.2_371-389s |
| 629 | AD-24199.1 | A-54914.1 | GGAuGcAGGGGuGuAccGcdTsdT | NM_014143.2_373-391s |
| 630 | | A-54915.1 | GCGGuAcACCCCUGcAUCCdTsdT | NM_014143.2_373-391s |
| 631 | AD-24200.1 | A-54916.1 | GuAccGcuGcAuGAucAGcdTsdT | NM_014143.2_385-403s |
| 632 | | A-54917.1 | GCUGAUcAUGcAGCGGuACdTsdT | NM_014143.2_385-403s |
| 633 | AD-24201.1 | A-54918.1 | AccGcuGcAuGAucAGcuAdTsdT | NM_014143.2_387-405s |
| 634 | | A-54919.1 | uAGCUGAUcAUGcAGCGGUdTsdT | NM_014143.2_387-405s |
| 635 | AD-24202.1 | A-54920.1 | AuGAucAGcuAuGGuGGuGdTsdT | NM_014143.2_395-413s |
| 636 | | A-54921.1 | cACcACcAuAGCUGAUcAUdTsdT | NM_014143.2_395-413s |
| 637 | AD-24203.1 | A-54922.1 | GcuAuGGuGGuGccGAcuAdTsdT | NM_014143.2_402-420s |
| 638 | | A-54923.1 | uAGUCGGcACcACcAuAGCdTsdT | NM_014143.2_402-420s |
| 639 | AD-24204.1 | A-54924.1 | uGccGAcuAcAAGcGAAuudTsdT | NM_014143.2_412-430s |
| 640 | | A-54925.1 | AAUUCGCUUGuAGUCGGcAdTsdT | NM_014143.2_412-430s |
| 641 | AD-24205.1 | A-54926.1 | AGcGAAuuAcuGuGAAAGudTsdT | NM_014143.2_423-441s |
| 642 | | A-54927.1 | ACUUUcAcAGuAAUUCGCUdTsdT | NM_014143.2_423-441s |
| 643 | AD-24206.1 | A-54928.1 | GcGAAuuAcuGuGAAAGucdTsdT | NM_014143.2_424-442s |
| 644 | | A-54929.1 | GACUUUcAcAGuAAUUCGCdTsdT | NM_014143.2_424-442s |
| 645 | AD-24207.1 | A-54930.1 | cGAAuuAcuGuGAAAGucAdTsdT | NM_014143.2_425-443s |
| 646 | | A-54931.1 | UGACUUUcAcAGuAAUUCGdTsdT | NM_014143.2_425-443s |
| 647 | AD-24208.1 | A-54932.1 | AuuAcuGuGAAAGucAAuGdTsdT | NM_014143.2_428-446s |
| 648 | | A-54933.1 | cAUUGACUUUcAcAGuAAUdTsdT | NM_014143.2_428-446s |
| 649 | AD-24209.1 | A-54934.1 | uAcuGuGAAAGucAAuGccdTsdT | NM_014143.2_430-448s |
| 650 | | A-54935.1 | GGcAUUGACUUUcAcAGuAdTsdT | NM_014143.2_430-448s |
| 651 | AD-24210.1 | A-54936.1 | AAAGucAAuGccccAuAcAdTsdT | NM_014143.2_437-455s |
| 652 | | A-54937.1 | UGuAUGGGGcAUUGACUUUdTsdT | NM_014143.2_437-455s |
| 653 | AD-24211.1 | A-54938.1 | GucAAuGccccAuAcAAcAdTsdT | NM_014143.2_440-458s |
| 654 | | A-54939.1 | UGUUGuAUGGGGcAUUGACdTsdT | NM_014143.2_440-458s |
| 655 | AD-24212.1 | A-54940.1 | AAuuuuGGuuGuGGAuccAdTsdT | NM_014143.2_472-490s |
| 656 | | A-54941.1 | UGGAUCcAcAACcAAAAUUdTsdT | NM_014143.2_472-490s |
| 657 | AD-24213.1 | A-54942.1 | AuuuuGGuuGuGGAuccAGdTsdT | NM_014143.2_473-491s |
| 658 | | A-54943.1 | CUGGAUCcAcAACcAAAAUdTsdT | NM_014143.2_473-491s |
| 659 | AD-24214.1 | A-54944.1 | AGucAccucuGAAcAuGAAdTsdT | NM_014143.2_490-508s |
| 660 | | A-54945.1 | UUcAUGUUcAGAGGUGACUdTsdT | NM_014143.2_490-508s |
| 661 | AD-24215.1 | A-54946.1 | AccucuGAAcAuGAAcuGAdTsdT | NM_014143.2_494-512s |
| 662 | | A-54947.1 | UcAGUUcAUGUUcAGAGGUdTsdT | NM_014143.2_494-512s |
| 663 | AD-24216.1 | A-54948.1 | ccucuGAAcAuGAAcuGAcdTsdT | NM_014143.2_495-513s |
| 664 | | A-54949.1 | GUcAGUUcAUGUUcAGAGGdTsdT | NM_014143.2_495-513s |
| 665 | AD-24217.1 | A-54950.1 | uGAAcAuGAAcuGAcAuGudTsdT | NM_014143.2_499-517s |
| 666 | | A-54951.1 | AcAUGUcAGUUcAUGUUcAdTsdT | NM_014143.2_499-517s |
| 667 | AD-24218.1 | A-54952.1 | AcAuGAAcuGAcAuGucAGdTsdT | NM_014143.2_502-520s |
| 668 | | A-54953.1 | CUGAcAUGUcAGUUcAUGUdTsdT | NM_014143.2_502-520s |
| 669 | AD-24219.1 | A-54954.1 | cAuGAAcuGAcAuGucAGGdTsdT | NM_014143.2_503-521s |
| 670 | | A-54955.1 | CCUGAcAUGUcAGUUcAUGdTsdT | NM_014143.2_503-521s |
| 671 | AD-24220.1 | A-54956.1 | uGAAcuGAcAuGucAGGcudTsdT | NM_014143.2_505-523s |
| 672 | | A-54957.1 | AGCCUGAcAUGUcAGUUcAdTsdT | NM_014143.2_505-523s |
| 673 | AD-24221.1 | A-54958.1 | GAAcuGAcAuGucAGGcuGdTsdT | NM_014143.2_506-524s |
| 674 | | A-54959.1 | cAGCCUGAcAUGUcAGUUCdTsdT | NM_014143.2_506-524s |
| 675 | AD-24222.1 | A-54960.1 | GAcAuGucAGGcuGAGGGcdTsdT | NM_014143.2_511-529s |
| 676 | | A-54961.1 | GCCCUcAGCCUGAcAUGUCdTsdT | NM_014143.2_511-529s |
| 677 | AD-24223.1 | A-54962.1 | uGucAGGcuGAGGGcuAccdTsdT | NM_014143.2_515-533s |
| 678 | | A-54963.1 | GGuAGCCCUcAGCCUGAcAdTsdT | NM_014143.2_515-533s |
| 679 | AD-24224.1 | A-54964.1 | uAccccAAGGccGAAGucAdTsdT | NM_014143.2_530-548s |
| 680 | | A-54965.1 | UGACUUCGGCCUUGGGGuAdTsdT | NM_014143.2_530-548s |
| 681 | AD-24225.1 | A-54966.1 | AAGGccGAAGucAucuGGAdTsdT | NM_014143.2_536-554s |
| 682 | | A-54967.1 | UCcAGAUGACUUCGGCCUUdTsdT | NM_014143.2_536-554s |
| 683 | AD-24226.1 | A-54968.1 | cGAAGucAucuGGAcAAGcdTsdT | NM_014143.2_541-559s |
| 684 | | A-54969.1 | GCUUGUCcAGAUGACUUCGdTsdT | NM_014143.2_541-559s |
| 685 | AD-24227.1 | A-54970.1 | cAucuGGAcAAGcAGuGAcdTsdT | NM_014143.2_547-565s |
| 686 | | A-54971.1 | GUcACUGCUUGUCcAGAUGdTsdT | NM_014143.2_547-565s |
| 687 | AD-24228.1 | A-54972.1 | AGcAGuGAccAucAAGuccdTsdT | NM_014143.2_557-575s |
| 688 | | A-54973.1 | GGACUUGAUGGUcACUGCUdTsdT | NM_014143.2_557-575s |
| 689 | AD-24229.1 | A-54974.1 | ucAAGuccuGAGuGGuAAGdTsdT | NM_014143.2_568-586s |
| 690 | | A-54975.1 | CUuACcACUcAGGACUUGAdTsdT | NM_014143.2_568-586s |
| 691 | AD-24230.1 | A-54976.1 | GAAucAAcAcAAcAAcuAAdTsdT | NM_014143.2_645-663s |
| 692 | | A-54977.1 | UuAGUUGUUGUGUUGAUUCdTsdT | NM_014143.2_645-663s |
| 693 | AD-24231.1 | A-54978.1 | AAucAAcAcAAcAAcuAAudTsdT | NM_014143.2_646-664s |
| 694 | | A-54979.1 | AUuAGUUGUUGUGUUGAUUdTsdT | NM_014143.2_646-664s |
| 695 | AD-24232.1 | A-54980.1 | uucuAcuGcAcuuuuAGGAdTsdT | NM_014143.2_671-689s |
| 696 | | A-54981.1 | UCCuAAAAGUGcAGuAGAAdTsdT | NM_014143.2_671-689s |
| 697 | AD-24233.1 | A-54982.1 | GcAcuuuuAGGAGAuuAGAdTsdT | NM_014143.2_678-696s |
| 698 | | A-54983.1 | UCuAAUCUCCuAAAAGUGCdTsdT | NM_014143.2_678-696s |
| 699 | AD-24234.1 | A-54984.1 | uuuuAGGAGAuuAGAuccudTsdT | NM_014143.2_682-700s |
| 700 | | A-54985.1 | AGGAUCuAAUCUCCuAAAAdTsdT | NM_014143.2_682-700s |
| 701 | AD-24235.1 | A-54986.1 | uuAGGAGAuuAGAuccuGAdTsdT | NM_014143.2_684-702s |
| 702 | | A-54987.1 | UcAGGAUCuAAUCUCCuAAdTsdT | NM_014143.2_684-702s |
| 703 | AD-24236.1 | A-54988.1 | uAGGAGAuuAGAuccuGAGdTsdT | NM_014143.2_685-703s |
| 704 | | A-54989.1 | CUcAGGAUCuAAUCUCCuAdTsdT | NM_014143.2_685-703s |
| 705 | AD-24237.1 | A-54990.1 | AGGAGAuuAGAuccuGAGGdTsdT | NM_014143.2_686-704s |
| 706 | | A-54991.1 | CCUcAGGAUCuAAUCUCCUdTsdT | NM_014143.2_686-704s |
| 707 | AD-24238.1 | A-54992.1 | GGAGAuuAGAuccuGAGGAdTsdT | NM_014143.2_687-705s |
| 708 | | A-54993.1 | UCCUcAGGAUCuAAUCUCCdTsdT | NM_014143.2_687-705s |
| 709 | AD-24239.1 | A-54994.1 | AAAccAuAcAGcuGAAuuGdTsdT | NM_014143.2_706-724s |
| 710 | | A-54995.1 | cAAUUcAGCUGuAUGGUUUdTsdT | NM_014143.2_706-724s |
| 711 | AD-24240.1 | A-54996.1 | AAccAuAcAGcuGAAuuGGdTsdT | NM_014143.2_707-725s |
| 712 | | A-54997.1 | CcAAUUcAGCUGuAUGGUUdTsdT | NM_014143.2_707-725s |
| 713 | AD-24241.1 | A-54998.1 | ccAuAcAGcuGAAuuGGucdTsdT | NM_014143.2_709-727s |
| 714 | | A-54999.1 | GACcAAUUcAGCUGuAUGGdTsdT | NM_014143.2_709-727s |
| 715 | AD-24242.1 | A-55000.1 | AuAcAGcuGAAuuGGucAudTsdT | NM_014143.2_711-729s |
| 716 | | A-55001.1 | AUGACcAAUUcAGCUGuAUdTsdT | NM_014143.2_711-729s |
| 717 | AD-24243.1 | A-55002.1 | GcuGAAuuGGucAucccAGdTsdT | NM_014143.2_716-734s |
| 718 | | A-55003.1 | CUGGGAUGACcAAUUcAGCdTsdT | NM_014143.2_716-734s |
| 719 | AD-24244.1 | A-55004.1 | GGucAucccAGAAcuAccudTsdT | NM_014143.2_724-742s |
| 720 | | A-55005.1 | AGGuAGUUCUGGGAUGACCdTsdT | NM_014143.2_724-742s |
| 721 | AD-24245.1 | A-55006.1 | uGGcAcAuccuccAAAuGAdTsdT | NM_014143.2_744-762s |
| 722 | | A-55007.1 | UcAUUUGGAGGAUGUGCcAdTsdT | NM_014143.2_744-762s |
| 723 | AD-24455.1 | A-55008.1 | uGAAAGGAcucAcuuGGuAdTsdT | NM_014143.2_760-778s |
| 724 | | A-55009.1 | uACcAAGUGAGUCCUUUcAdTsdT | NM_014143.2_760-778s |
| 725 | AD-24456.1 | A-55010.1 | AGGAcucAcuuGGuAAuucdTsdT | NM_014143.2_764-782s |
| 726 | | A-55011.1 | GAAUuACcAAGUGAGUCCUdTsdT | NM_014143.2_764-782s |
| 727 | AD-24457.1 | A-55012.1 | GAcucAcuuGGuAAuucuGdTsdT | NM_014143.2_766-784s |
| 728 | | A-55013.1 | cAGAAUuACcAAGUGAGUCdTsdT | NM_014143.2_766-784s |
| 729 | AD-24458.1 | A-55014.1 | ucAcuuGGuAAuucuGGGAdTsdT | NM_014143.2_769-787s |
| 730 | | A-55015.1 | UCCcAGAAUuACcAAGUGAdTsdT | NM_014143.2_769-787s |
| 731 | AD-24459.1 | A-55016.1 | GGuAAuucuGGGAGccAucdTsdT | NM_014143.2_775-793s |
| 732 | | A-55017.1 | GAUGGCUCCcAGAAUuACCdTsdT | NM_014143.2_775-793s |
| 733 | AD-24460.1 | A-55018.1 | GuAAuucuGGGAGccAucudTsdT | NM_014143.2_776-794s |
| 734 | | A-55019.1 | AGAUGGCUCCcAGAAUuACdTsdT | NM_014143.2_776-794s |
| 735 | AD-24461.1 | A-55020.1 | ucuGGGAGccAucuuAuuAdTsdT | NM_014143.2_781-799s |
| 736 | | A-55021.1 | uAAuAAGAUGGCUCCcAGAdTsdT | NM_014143.2_781-799s |
| 737 | AD-24462.1 | A-55022.1 | cuGGGAGccAucuuAuuAudTsdT | NM_014143.2_782-800s |
| 738 | | A-55023.1 | AuAAuAAGAUGGCUCCcAGdTsdT | NM_014143.2_782-800s |
| 739 | AD-24463.1 | A-55024.1 | uGGGAGccAucuuAuuAuGdTsdT | NM_014143.2_783-801s |
| 740 | | A-55025.1 | cAuAAuAAGAUGGCUCCcAdTsdT | NM_014143.2_783-801s |
| 741 | AD-24464.1 | A-55026.1 | GGGAGccAucuuAuuAuGcdTsdT | NM_014143.2_784-802s |
| 742 | | A-55027.1 | GcAuAAuAAGAUGGCUCCCdTsdT | NM_014143.2_784-802s |
| 743 | AD-24465.1 | A-55028.1 | AGccAucuuAuuAuGccuudTsdT | NM_014143.2_787-805s |
| 744 | | A-55029.1 | AAGGcAuAAuAAGAUGGCUdTsdT | NM_014143.2_787-805s |
| 745 | AD-24466.1 | A-55030.1 | AucuuAuuAuGccuuGGuGdTsdT | NM_014143.2_791-809s |
| 746 | | A-55031.1 | cACcAAGGcAuAAuAAGAUdTsdT | NM_014143.2_791-809s |
| 747 | AD-24467.1 | A-55032.1 | uAuuAuGccuuGGuGuAGcdTsdT | NM_014143.2_795-813s |
| 748 | | A-55033.1 | GCuAcACcAAGGcAuAAuAdTsdT | NM_014143.2_795-813s |
| 749 | AD-24468.1 | A-55034.1 | AuuAuGccuuGGuGuAGcAdTsdT | NM_014143.2_796-814s |
| 750 | | A-55035.1 | UGCuAcACcAAGGcAuAAUdTsdT | NM_014143.2_796-814s |
| 751 | AD-24469.1 | A-55036.1 | uGccuuGGuGuAGcAcuGAdTsdT | NM_014143.2_800-818s |
| 752 | | A-55037.1 | UcAGUGCuAcACcAAGGcAdTsdT | NM_014143.2_800-818s |
| 753 | AD-24470.1 | A-55038.1 | uGGuGuAGcAcuGAcAuucdTsdT | NM_014143.2_805-823s |
| 754 | | A-55039.1 | GAAUGUcAGUGCuAcACcAdTsdT | NM_014143.2_805-823s |
| 755 | AD-24471.1 | A-55040.1 | GuAGcAcuGAcAuucAucudTsdT | NM_014143.2_809-827s |
| 756 | | A-55041.1 | AGAUGAAUGUcAGUGCuACdTsdT | NM_014143.2_809-827s |
| 757 | AD-24472.1 | A-55042.1 | cuGAcAuucAucuuccGuudTsdT | NM_014143.2_815-833s |
| 758 | | A-55043.1 | AACGGAAGAUGAAUGUcAGdTsdT | NM_014143.2_815-833s |
| 759 | AD-24473.1 | A-55044.1 | AGGGAGAAuGAuGGAuGuGdTsdT | NM_014143.2_841-859s |
| 760 | | A-55045.1 | cAcAUCcAUcAUUCUCCCUdTsdT | NM_014143.2_841-859s |
| 761 | AD-24474.1 | A-55046.1 | uGGcAuccAAGAuAcAAAcdTsdT | NM_014143.2_868-886s |
| 762 | | A-55047.1 | GUUUGuAUCUUGGAUGCcAdTsdT | NM_014143.2_868-886s |
| 763 | AD-24475.1 | A-55048.1 | GGcAuccAAGAuAcAAAcudTsdT | NM_014143.2_869-887s |
| 764 | | A-55049.1 | AGUUUGuAUCUUGGAUGCCdTsdT | NM_014143.2_869-887s |
| 765 | AD-24476.1 | A-55050.1 | GcAuccAAGAuAcAAAcucdTsdT | NM_014143.2_870-888s |
| 766 | | A-55051.1 | GAGUUUGuAUCUUGGAUGCdTsdT | NM_014143.2_870-888s |
| 767 | AD-24477.1 | A-55052.1 | cAAAGuGAuAcAcAuuuGGdTsdT | NM_014143.2_896-914s |
| 768 | | A-55053.1 | CcAAAUGUGuAUcACUUUGdTsdT | NM_014143.2_896-914s |
| 769 | AD-24478.1 | A-55054.1 | GuGAuAcAcAuuuGGAGGAdTsdT | NM_014143.2_900-918s |
| 770 | | A-55055.1 | UCCUCcAAAUGUGuAUcACdTsdT | NM_014143.2_900-918s |
| 771 | AD-24479.1 | A-55056.1 | AcAcAuuuGGAGGAGAcGudTsdT | NM_014143.2_905-923s |
| 772 | | A-55057.1 | ACGUCUCCUCcAAAUGUGUdTsdT | NM_014143.2_905-923s |
| 773 | AD-24480.1 | A-55058.1 | AcAuuuGGAGGAGAcGuAAdTsdT | NM_014143.2_907-925s |
| 774 | | A-55059.1 | UuACGUCUCCUCcAAAUGUdTsdT | NM_014143.2_907-925s |
| 775 | AD-24481.1 | A-55060.1 | cAuuuGGAGGAGAcGuAAudTsdT | NM_014143.2_908-926s |
| 776 | | A-55061.1 | AUuACGUCUCCUCcAAAUGdTsdT | NM_014143.2_908-926s |
| 777 | AD-24482.1 | A-55062.1 | GGAGGAGAcGuAAuccAGcdTsdT | NM_014143.2_913-931s |
| 778 | | A-55063.1 | GCUGGAUuACGUCUCCUCCdTsdT | NM_014143.2_913-931s |
| 779 | AD-24483.1 | A-55064.1 | AcGuAAuccAGcAuuGGAAdTsdT | NM_014143.2_920-938s |
| 780 | | A-55065.1 | UUCcAAUGCUGGAUuACGUdTsdT | NM_014143.2_920-938s |
| 781 | AD-24484.1 | A-55066.1 | AAccuGuGGuuuAGGGGuudTsdT | NM_014143.2_965-983s |
| 782 | | A-55067.1 | AACCCCuAAACcAcAGGUUdTsdT | NM_014143.2_965-983s |
| 783 | AD-24485.1 | A-55068.1 | ccuGuGGuuuAGGGGuucAdTsdT | NM_014143.2_967-985s |
| 784 | | A-55069.1 | UGAACCCCuAAACcAcAGGdTsdT | NM_014143.2_967-985s |
| 785 | AD-24486.1 | A-55070.1 | cuGuGGuuuAGGGGuucAudTsdT | NM_014143.2_968-986s |
| 786 | | A-55071.1 | AUGAACCCCuAAACcAcAGdTsdT | NM_014143.2_968-986s |
| 787 | AD-24487.1 | A-55072.1 | uGGuuuAGGGGuucAucGGdTsdT | NM_014143.2_971-989s |
| 788 | | A-55073.1 | CCGAUGAACCCCuAAACcAdTsdT | NM_014143.2_971-989s |
| 789 | AD-24488.1 | A-55074.1 | GGuuuAGGGGuucAucGGGdTsdT | NM_014143.2_972-990s |
| 790 | | A-55075.1 | CCCGAUGAACCCCuAAACCdTsdT | NM_014143.2_972-990s |
| 791 | AD-24489.1 | A-55078.1 | AGGcAAuGuGGGAcuuAAAdTsdT | NM_014143.2_1031-1049s |
| 792 | | A-55079.1 | UUuAAGUCCcAcAUUGCCUdTsdT | NM_014143.2_1031-1049s |
| 793 | AD-24490.1 | A-55080.1 | GGcAAuGuGGGAcuuAAAAdTsdT | NM_014143.2_1032-1050s |
| 794 | | A-55081.1 | UUUuAAGUCCcAcAUUGCCdTsdT | NM_014143.2_1032-1050s |
| 795 | AD-24491.1 | A-55082.1 | GcAAuGuGGGAcuuAAAAGdTsdT | NM_014143.2_1033-1051s |
| 796 | | A-55083.1 | CUUUuAAGUCCcAcAUUGCdTsdT | NM_014143.2_1033-1051s |
| 797 | AD-24492.1 | A-55084.1 | uGAAAAuGGAAccuGGcGAdTsdT | NM_014143.2_1062-1080s |
| 798 | | A-55085.1 | UCGCcAGGUUCcAUUUUcAdTsdT | NM_014143.2_1062-1080s |
| 799 | AD-24493.1 | A-55086.1 | AAAAuGGAAccuGGcGAAAdTsdT | NM_014143.2_1064-1082s |
| 800 | | A-55087.1 | UUUCGCcAGGUUCcAUUUUdTsdT | NM_014143.2_1064-1082s |
| 801 | AD-24494.1 | A-55088.1 | GAGGGAGAccuuGAuAcuudTsdT | NM_014143.2_1128-1146s |
| 802 | | A-55089.1 | AAGuAUcAAGGUCUCCCUCdTsdT | NM_014143.2_1128-1146s |
| 803 | AD-24495.1 | A-55090.1 | AGGGAGAccuuGAuAcuuudTsdT | NM_014143.2_1129-1147s |
| 804 | | A-55091.1 | AAAGuAUcAAGGUCUCCCUdTsdT | NM_014143.2_1129-1147s |
| 805 | AD-24496.1 | A-55092.1 | AGAccuuGAuAcuuucAAAdTsdT | NM_014143.2_1133-1151s |
| 806 | | A-55093.1 | UUUGAAAGuAUcAAGGUCUdTsdT | NM_014143.2_1133-1151s |
| 807 | AD-24497.1 | A-55094.1 | uuGAuAcuuucAAAuGccudTsdT | NM_014143.2_1138-1156s |
| 808 | | A-55095.1 | AGGcAUUUGAAAGuAUcAAdTsdT | NM_014143.2_1138-1156s |
| 809 | AD-24498.1 | A-55096.1 | AAuGccuGAGGGGcucAucdTsdT | NM_014143.2_1150-1168s |
| 810 | | A-55097.1 | GAUGAGCCCCUcAGGcAUUdTsdT | NM_014143.2_1150-1168s |
| 811 | AD-24499.1 | A-55098.1 | uGccuGAGGGGcucAucGAdTsdT | NM_014143.2_1152-1170s |
| 812 | | A-55099.1 | UCGAUGAGCCCCUcAGGcAdTsdT | NM_014143.2_1152-1170s |
| 813 | AD-24500.1 | A-55100.1 | GGGcucAucGAcGccuGuGdTsdT | NM_014143.2_1160-1178s |
| 814 | | A-55101.1 | cAcAGGCGUCGAUGAGCCCdTsdT | NM_014143.2_1160-1178s |
| 815 | AD-24501.1 | A-55102.1 | GGcucAucGAcGccuGuGAdTsdT | NM_014143.2_1161-1179s |
| 816 | | A-55103.1 | UcAcAGGCGUCGAUGAGCCdTsdT | NM_014143.2_1161-1179s |
| 817 | AD-24502.1 | A-55104.1 | AucGAcGccuGuGAcAGGGdTsdT | NM_014143.2_1166-1184s |
| 818 | | A-55105.1 | CCCUGUcAcAGGCGUCGAUdTsdT | NM_014143.2_1166-1184s |
| 819 | AD-24503.1 | A-55106.1 | AGGAGccuccAAGcAAAucdTsdT | NM_014143.2_1205-1223s |
| 820 | | A-55107.1 | GAUUUGCUUGGAGGCUCCUdTsdT | NM_014143.2_1205-1223s |
| 821 | AD-24504.1 | A-55108.1 | AuccAuuGcucAuccuAGGdTsdT | NM_014143.2_1224-1242s |
| 822 | | A-55109.1 | CCuAGGAUGAGcAAUGGAUdTsdT | NM_014143.2_1224-1242s |
| 823 | AD-24505.1 | A-55110.1 | ucAuccuAGGAAGAcGGGudTsdT | NM_014143.2_1233-1251s |
| 824 | | A-55111.1 | ACCCGUCUUCCuAGGAUGAdTsdT | NM_014143.2_1233-1251s |
| 825 | AD-24506.1 | A-55112.1 | cAuccuAGGAAGAcGGGuudTsdT | NM_014143.2_1234-1252s |
| 826 | | A-55113.1 | AACCCGUCUUCCuAGGAUGdTsdT | NM_014143.2_1234-1252s |
| 827 | AD-24507.1 | A-55114.1 | cuAGGAAGAcGGGuuGAGAdTsdT | NM_014143.2_1238-1256s |
| 828 | | A-55115.1 | UCUcAACCCGUCUUCCuAGdTsdT | NM_014143.2_1238-1256s |
| 829 | AD-24508.1 | A-55116.1 | AcGGGuuGAGAAucccuAAdTsdT | NM_014143.2_1246-1264s |
| 830 | | A-55117.1 | UuAGGGAUUCUcAACCCGUdTsdT | NM_014143.2_1246-1264s |
| 831 | AD-24509.1 | A-55118.1 | AGAAucccuAAuuuGAGGGdTsdT | NM_014143.2_1254-1272s |
| 832 | | A-55119.1 | CCCUcAAAUuAGGGAUUCUdTsdT | NM_014143.2_1254-1272s |
| 833 | AD-24510.1 | A-55120.1 | AAucccuAAuuuGAGGGucdTsdT | NM_014143.2_1256-1274s |
| 834 | | A-55121.1 | GACCCUcAAAUuAGGGAUUdTsdT | NM_014143.2_1256-1274s |
| 835 | AD-24511.1 | A-55122.1 | cccuAAuuuGAGGGucAGudTsdT | NM_014143.2_1259-1277s |
| 836 | | A-55123.1 | ACUGACCCUcAAAUuAGGGdTsdT | NM_014143.2_1259-1277s |
| 837 | AD-24512.1 | A-55124.1 | cAcucAAuGccucAAuuuGdTsdT | NM_014143.2_1302-1320s |
| 838 | | A-55125.1 | cAAAUUGAGGcAUUGAGUGdTsdT | NM_014143.2_1302-1320s |
| 839 | AD-24513.1 | A-55126.1 | AcucAAuGccucAAuuuGudTsdT | NM_014143.2_1303-1321s |
| 840 | | A-55127.1 | AcAAAUUGAGGcAUUGAGUdTsdT | NM_014143.2_1303-1321s |
| 841 | AD-24514.1 | A-55128.1 | uucuGcAuGAcuGAGAGucdTsdT | NM_014143.2_1323-1341s |
| 842 | | A-55129.1 | GACUCUcAGUcAUGcAGAAdTsdT | NM_014143.2_1323-1341s |
| 843 | AD-24515.1 | A-55130.1 | ucuGcAuGAcuGAGAGucudTsdT | NM_014143.2_1324-1342s |
| 844 | | A-55131.1 | AGACUCUcAGUcAUGcAGAdTsdT | NM_014143.2_1324-1342s |
| 845 | AD-24516.1 | A-55132.1 | GcAuGAcuGAGAGucucAGdTsdT | NM_014143.2_1327-1345s |
| 846 | | A-55133.1 | CUGAGACUCUcAGUcAUGCdTsdT | NM_014143.2_1327-1345s |
| 847 | AD-24517.1 | A-55134.1 | GAcuGAGAGucucAGuGuudTsdT | NM_014143.2_1331-1349s |
| 848 | | A-55135.1 | AAcACUGAGACUCUcAGUCdTsdT | NM_014143.2_1331-1349s |
| 849 | AD-24518.1 | A-55136.1 | GAGucucAGuGuuGGAAcGdTsdT | NM_014143.2_1337-1355s |
| 850 | | A-55137.1 | CGUUCcAAcACUGAGACUCdTsdT | NM_014143.2_1337-1355s |
| 851 | AD-24519.1 | A-55138.1 | cucAGuGuuGGAAcGGGAcdTsdT | NM_014143.2_1341-1359s |
| 852 | | A-55139.1 | GUCCCGUUCcAAcACUGAGdTsdT | NM_014143.2_1341-1359s |
| 853 | AD-24520.1 | A-55140.1 | uuAuuuuGAGucuGuGAGGdTsdT | NM_014143.2_1386-1404s |
| 854 | | A-55141.1 | CCUcAcAGACUcAAAAuAAdTsdT | NM_014143.2_1386-1404s |
| 855 | AD-24521.1 | A-55142.1 | AuuuuGAGucuGuGAGGucdTsdT | NM_014143.2_1388-1406s |
| 856 | | A-55143.1 | GACCUcAcAGACUcAAAAUdTsdT | NM_014143.2_1388-1406s |
| 857 | AD-24522.1 | A-55144.1 | AuAuAuuGuAGuAGAuGuudTsdT | NM_014143.2_1449-1467s |
| 858 | | A-55145.1 | AAcAUCuACuAcAAuAuAUdTsdT | NM_014143.2_1449-1467s |
| 859 | AD-24523.1 | A-55146.1 | AcuAAAcuuGcuGcuuAAudTsdT | NM_014143.2_1484-1502s |
| 860 | | A-55147.1 | AUuAAGcAGcAAGUUuAGUdTsdT | NM_014143.2_1484-1502s |
| 861 | AD-24524.1 | A-55148.1 | GcuGcuuAAuGAuuuGcucdTsdT | NM_014143.2_1493-1511s |
| 862 | | A-55149.1 | GAGcAAAUcAUuAAGcAGCdTsdT | NM_014143.2_1493-1511s |
| 863 | AD-24525.1 | A-55150.1 | uuAAuGAuuuGcucAcAucdTsdT | NM_014143.2_1498-1516s |
| 864 | | A-55151.1 | GAUGUGAGcAAAUcAUuAAdTsdT | NM_014143.2_1498-1516s |
| 865 | AD-24526.1 | A-55152.1 | cAcAucuAGuAAAAcAuGGdTsdT | NM_014143.2_1511-1529s |
| 866 | | A-55153.1 | CcAUGUUUuACuAGAUGUGdTsdT | NM_014143.2_1511-1529s |
| 867 | AD-24527.1 | A-55154.1 | cuAGuAAAAcAuGGAGuAudTsdT | NM_014143.2_1516-1534s |
| 868 | | A-55155.1 | AuACUCcAUGUUUuACuAGdTsdT | NM_014143.2_1516-1534s |

TABLE 4
In vitro screening Results for Human CD274/PD-L1 iRNAs

| | RKO | | | | | | Hep3B | | RKO | | |
|---|---|---|---|---|---|---|---|---|---|---|---|
| | 10 | 10 | 10 | 0.1 | 0.1 | 0.1 | 10 | 0.1 | IC50 | IC50 | IC50 |
| | nM | nM | nM | nM | nM | nM | nM | nM | Rep | Rep | Rep |
| Duplex ID | Rep 1 | Rep 2 | Avg | Rep 1 | Rep 2 | Avg | Rep 1 | Rep 1 | 1 (nM) | 2 (nM) | 3 (nM) |
| AD-22303-b1 | 0.37 | 0.40 | 0.39 | 0.82 | 0.84 | 0.83 | 0.47 | 0.58 | | | |
| AD-22304-b1 | 0.80 | 0.78 | 0.79 | 0.89 | 0.89 | 0.89 | 0.87 | 1.25 | | | |
| AD-22305-b1 | 0.41 | 0.41 | 0.41 | 0.84 | 0.79 | 0.81 | 0.87 | 0.88 | | | |
| AD-22306-b1 | 0.54 | 0.56 | 0.55 | 0.87 | 0.88 | 0.88 | 0.89 | 1.11 | | | |
| AD-22307-b1 | 0.84 | 0.87 | 0.86 | 0.96 | 0.96 | 0.96 | 1.03 | 1.12 | | | |
| AD-22309-b1 | 0.34 | 0.43 | 0.38 | 0.52 | 0.56 | 0.54 | 0.52 | 0.54 | | | |
| AD-22310-bl | 0.24 | 0.25 | 0.25 | 0.82 | 0.79 | 0.80 | 0.54 | 0.60 | | | |
| AD-22311-b1 | 0.70 | 0.74 | 0.72 | 0.95 | 0.90 | 0.92 | 0.83 | 1.04 | | | |
| AD-22312-b1 | 0.37 | 0.35 | 0.36 | 0.76 | 0.67 | 0.71 | 0.44 | 0.55 | | | |
| AD-22313-b1 | 0.83 | 0.73 | 0.78 | 0.93 | 0.90 | 0.91 | 0.35 | 0.99 | | | |
| AD-22314-b1 | 0.67 | 0.58 | 0.62 | 0.93 | 0.80 | 0.86 | 0.84 | 1.22 | | | |
| AD-22315-b1 | 0.98 | 0.98 | 0.98 | 1.11 | 0.91 | 1.01 | 1.08 | 1.18 | | | |
| AD-22316-b1 | 0.68 | 0.65 | 0.67 | 0.91 | 0.87 | 0.89 | 0.72 | 1.47 | | | |
| AD-22317-b1 | 0.65 | 0.60 | 0.63 | 0.92 | 0.89 | 0.90 | 1.07 | 0.89 | | | |
| AD-22318-b1 | 0.73 | 0.68 | 0.71 | 0.96 | 0.89 | 0.92 | 1.07 | 0.83 | | | |
| AD-22319-b1 | 0.40 | 0.40 | 0.40 | 0.90 | 0.90 | 0.90 | 0.76 | 1.10 | | | |
| AD-22320-b1 | 0.80 | 0.76 | 0.78 | 0.96 | 0.91 | 0.93 | 0.84 | 0.88 | | | |
| AD-22321-b1 | 0.59 | 0.58 | 0.59 | 0.93 | 0.89 | 0.91 | 0.88 | 0.79 | | | |
| AD-22322-b1 | 0.83 | 0.76 | 0.80 | 0.94 | 0.97 | 0.95 | 0.85 | 1.05 | | | |
| AD-22323-b1 | 0.84 | 0.78 | 0.81 | 1.00 | 0.94 | 0.97 | 0.82 | 0.42 | | | |
| AD-22325-b1 | 0.63 | 0.56 | 0.59 | 0.97 | 0.89 | 0.93 | 0.54 | 0.65 | | | |
| AD-22326-b1 | 0.58 | 0.48 | 0.53 | 0.92 | 0.86 | 0.89 | 0.45 | 1.33 | | | |
| AD-22327-b1 | 0.58 | 0.49 | 0.54 | 0.92 | 0.87 | 0.90 | 0.58 | 1.00 | | | |
| AD-22328-b1 | 0.88 | 0.74 | 0.81 | 0.97 | 0.85 | 0.91 | 1.07 | 1.09 | | | |
| AD-22329-b1 | 0.81 | 0.73 | 0.77 | 0.96 | 0.93 | 0.95 | 0.61 | 0.90 | | | |
| AD-22330-b1 | 0.90 | 0.86 | 0.88 | 0.99 | 0.95 | 0.97 | 1.13 | 0.90 | | | |
| AD-22331-b1 | 0.56 | 0.61 | 0.59 | 0.94 | 0.89 | 0.91 | 0.75 | 0.59 | | | |
| AD-22332-b1 | 0.91 | 0.89 | 0.90 | 0.94 | 0.95 | 0.94 | 0.84 | 1.14 | | | |
| AD-22333-b1 | 0.41 | 0.38 | 0.39 | 0.84 | 0.85 | 0.84 | 0.74 | 0.92 | | | |
| AD-22334-b1 | 0.97 | 0.94 | 0.96 | 0.97 | 0.97 | 0.97 | 1.32 | 1.35 | | | |
| AD-22335-b1 | 0.99 | 0.88 | 0.93 | 0.96 | 1.00 | 0.98 | 1.09 | 0.83 | | | |
| AD-22336-b1 | 0.62 | 0.56 | 0.59 | 0.93 | 0.99 | 0.96 | 0.71 | 0.79 | | | |
| AD-22337-b1 | 0.71 | 0.65 | 0.68 | 1.01 | 0.95 | 0.98 | 0.55 | 0.67 | | | |
| AD-22338-b1 | 0.31 | 0.30 | 0.30 | 0.81 | 0.77 | 0.79 | 0.76 | 0.75 | | | |
| AD-22339-b1 | 0.79 | 0.83 | 0.81 | 0.96 | 0.93 | 0.94 | 0.78 | 0.57 | | | |
| AD-22340-b1 | 0.45 | 0.49 | 0.47 | 0.96 | 0.76 | 0.86 | 0.54 | 0.90 | | | |
| AD-22341-b1 | 0.50 | 0.51 | 0.50 | 0.96 | 0.88 | 0.92 | 0.67 | 0.89 | | | |
| AD-22342-b1 | 0.32 | 0.29 | 0.31 | 0.82 | 0.79 | 0.81 | 0.53 | 0.66 | | | |
| AD-22343-b1 | 0.26 | 0.27 | 0.27 | 0.69 | 0.72 | 0.71 | 0.34 | 0.62 | | | |
| AD-22344-b1 | 1.00 | 0.95 | 0.98 | 0.97 | 0.96 | 0.96 | 0.57 | 0.88 | | | |
| AD-22345-b1 | 0.80 | 0.78 | 0.79 | 0.97 | 0.99 | 0.98 | 1.05 | 1.73 | | | |
| AD-22346-b1 | 0.78 | 0.76 | 0.77 | 0.96 | 0.91 | 0.93 | 0.69 | 0.69 | | | |
| AD-22347-b1 | 0.67 | 0.59 | 0.63 | 0.78 | 0.79 | 0.78 | 0.61 | 0.47 | | | |
| AD-22348-b1 | 0.94 | 0.87 | 0.90 | 0.94 | 0.94 | 0.94 | 0.68 | 0.63 | | | |
| AD-22349-b1 | 0.12 | 0.11 | 0.11 | 0.66 | 0.64 | 0.65 | 0.30 | 0.33 | | | |
| AD-22350-b1 | 0.68 | 0.64 | 0.66 | 0.93 | 0.89 | 0.91 | 0.87 | 0.81 | | | |
| AD-1955 | 1.04 | 1.00 | 1.02 | 0.97 | 0.96 | 0.96 | ND | ND | | | |
| AD-1955 | 1.05 | 1.02 | 1.04 | 0.97 | 1.01 | 0.99 | ND | ND | | | |
| AD-1955 | 0.99 | 0.92 | 0.95 | 0.98 | 0.99 | 0.98 | ND | ND | | | |
| AD-1955 | 0.97 | 0.95 | 0.96 | 0.97 | 1.03 | 1.00 | ND | ND | | | |
| AD-1955 | 1.00 | 1.05 | 1.02 | 0.99 | 1.00 | 1.00 | ND | ND | | | |
| AD-1955 | 0.96 | 1.07 | 1.01 | 0.38 | 1.01 | 0.69 | ND | ND | | | |
| AD-24151-b1 | 0.79 | 0.78 | 0.79 | 0.83 | 0.86 | 0.85 | ND | ND | | | |
| AD-24152-b1 | 1.02 | 0.95 | 0.99 | 0.98 | 0.87 | 0.92 | ND | ND | | | |
| AD-24153-b1 | 0.91 | 0.89 | 0.90 | 0.98 | 0.88 | 0.93 | ND | ND | | | |
| AD-24154-b1 | 0.93 | 0.92 | 0.93 | 0.97 | 0.94 | 0.95 | ND | ND | | | |
| AD-24155-b1 | 0.55 | 0.54 | 0.55 | 0.71 | 0.69 | 0.70 | ND | ND | | | |
| AD-24156-b1 | 0.49 | 0.49 | 0.49 | 0.89 | 0.86 | 0.87 | ND | ND | | | |
| AD-24157-b1 | 0.68 | 0.72 | 0.70 | 0.93 | 0.85 | 0.89 | ND | ND | | | |
| AD-24158-b1 | 0.74 | 0.74 | 0.74 | 0.95 | 0.87 | 0.91 | ND | ND | | | |
| AD-24159-b1 | 0.84 | 0.96 | 0.90 | 0.94 | 0.82 | 0.88 | ND | ND | | | |
| AD-24160-b1 | 0.24 | 0.26 | 0.25 | 0.54 | 0.52 | 0.53 | ND | ND | | | |
| AD-24161-b1 | 0.71 | 0.78 | 0.75 | 0.84 | 0.95 | 0.90 | ND | ND | | | |
| AD-24162-b1 | 0.69 | 0.78 | 0.74 | 0.87 | 0.85 | 0.86 | ND | ND | | | |
| AD-24163-b1 | 0.94 | 0.88 | 0.91 | 1.00 | 0.94 | 0.97 | ND | ND | | | |
| AD-24164-b1 | 0.88 | 0.82 | 0.85 | 0.95 | 0.88 | 0.92 | ND | ND | | | |
| AD-24165-b1 | 1.00 | 0.89 | 0.94 | 0.96 | 0.93 | 0.94 | ND | ND | | | |
| AD-24166-b1 | 0.70 | 0.66 | 0.68 | 0.85 | 0.89 | 0.87 | ND | ND | | | |
| AD-24167-b1 | 0.89 | 0.90 | 0.89 | 0.95 | 0.92 | 0.94 | ND | ND | | | |
| AD-24168-b1 | 0.58 | 0.60 | 0.59 | 0.80 | 0.76 | 0.78 | ND | ND | | | |
| AD-24169-b1 | 0.13 | 0.13 | 0.13 | 0.41 | 0.31 | 0.36 | ND | ND | 0.276 | 0.070 | 0.030 |
| AD-24170-b1 | 0.30 | 0.32 | 0.31 | 0.63 | 0.52 | 0.58 | ND | ND | | | |
| AD-24171-b1 | 0.71 | 0.67 | 0.69 | 0.89 | 0.86 | 0.88 | ND | ND | | | |
| AD-24172-b1 | 0.54 | 0.49 | 0.52 | 0.75 | 0.70 | 0.73 | ND | ND | | | |
| AD-24173-b1 | 0.30 | 0.28 | 0.29 | 0.70 | 0.54 | 0.62 | ND | ND | | | |
| AD-24174-b1 | 0.94 | 0.88 | 0.91 | 0.94 | 0.82 | 0.88 | ND | ND | | | |
| AD-24175-b1 | 0.14 | 0.15 | 0.14 | 0.62 | 0.47 | 0.55 | ND | ND | 0.383 | 0.074 | 0.015 |
| AD-24176-b1 | 0.53 | 0.49 | 0.51 | 0.91 | 0.89 | 0.90 | ND | ND | | | |
| AD-24177-b1 | 0.95 | 0.85 | 0.90 | 0.96 | 0.91 | 0.94 | ND | ND | | | |
| AD-24178-b1 | 0.25 | 0.28 | 0.26 | 0.83 | 0.75 | 0.79 | ND | ND | | | |
| AD-24179-b1 | 0.64 | 0.66 | 0.65 | 0.91 | 0.93 | 0.92 | ND | ND | | | |
| AD-24180-b1 | 0.84 | 0.93 | 0.88 | 0.88 | 0.90 | 0.89 | ND | ND | | | |
| AD-24181-b1 | 0.89 | 0.90 | 0.90 | 0.95 | 1.01 | 0.98 | ND | ND | | | |
| AD-24182-b1 | 0.85 | 0.81 | 0.83 | 0.96 | 0.86 | 0.91 | ND | ND | | | |
| AD-24183-b1 | 0.79 | 0.75 | 0.77 | 0.91 | 0.82 | 0.86 | ND | ND | | | |
| AD-24184-b1 | 0.67 | 0.57 | 0.62 | 0.95 | 0.92 | 0.93 | ND | ND | | | |
| AD-24185-b1 | 0.45 | 0.43 | 0.44 | 0.87 | 0.88 | 0.88 | ND | ND | | | |
| AD-24186-b1 | 0.97 | 0.90 | 0.94 | 0.95 | 0.91 | 0.93 | ND | ND | | | |
| AD-24187-b1 | 0.23 | 0.23 | 0.23 | 0.44 | 0.43 | 0.43 | ND | ND | | | |
| AD-24188-b1 | 0.79 | 0.82 | 0.80 | 0.84 | 0.83 | 0.84 | ND | ND | | | |
| AD-24189-b1 | 0.72 | 0.79 | 0.75 | 0.78 | 0.81 | 0.79 | ND | ND | | | |
| AD-24190-b1 | 0.33 | 0.35 | 0.34 | 0.57 | 0.55 | 0.56 | ND | ND | | | |
| AD-24191-b1 | 0.84 | 0.87 | 0.86 | 0.88 | 0.93 | 0.91 | ND | ND | | | |
| AD-24192-b1 | 0.98 | 0.98 | 0.98 | 0.93 | 0.91 | 0.92 | ND | ND | | | |
| AD-24193-b1 | 0.96 | 1.03 | 0.99 | 0.93 | 0.96 | 0.95 | ND | ND | | | |
| AD-24194-b1 | 0.28 | 0.29 | 0.29 | 0.76 | 0.68 | 0.72 | ND | ND | | | |
| AD-24195-b1 | 0.61 | 0.60 | 0.60 | 0.77 | 0.79 | 0.78 | ND | ND | | | |
| AD-24196-b1 | 0.69 | 0.76 | 0.72 | 0.91 | 0.82 | 0.86 | ND | ND | | | |
| AD-24197-b1 | 1.02 | 0.97 | 1.00 | 0.87 | 0.88 | 0.88 | ND | ND | | | |
| AD-24198-b1 | 0.91 | 0.86 | 0.89 | 0.94 | 0.82 | 0.88 | ND | ND | | | |
| AD-24199-b1 | 0.64 | 0.66 | 0.65 | 0.89 | 0.84 | 0.87 | ND | ND | | | |
| AD-24200-b1 | 0.87 | 0.86 | 0.87 | 0.98 | 0.92 | 0.95 | ND | ND | | | |
| AD-24201-b1 | 0.43 | 0.41 | 0.42 | 0.82 | 0.75 | 0.79 | ND | ND | | | |
| AD-24202-b1 | 0.87 | 0.95 | 0.91 | 0.89 | 0.96 | 0.93 | ND | ND | | | |
| AD-24203-b1 | 0.91 | 0.94 | 0.93 | 0.86 | 0.89 | 0.87 | ND | ND | | | |
| AD-24204-b1 | 0.61 | 0.71 | 0.66 | 0.88 | 0.76 | 0.82 | ND | ND | | | |
| AD-24205-b1 | 0.33 | 0.35 | 0.34 | 0.67 | 0.63 | 0.65 | ND | ND | | | |
| AD-24206-b1 | 0.50 | 0.51 | 0.51 | 0.72 | 0.72 | 0.72 | ND | ND | | | |
| AD-24207-b1 | 0.55 | 0.54 | 0.55 | 0.73 | 0.66 | 0.70 | ND | ND | | | |
| AD-24208-b1 | 0.84 | 0.82 | 0.83 | 0.93 | 0.87 | 0.90 | ND | ND | | | |
| AD-24209-b1 | 0.26 | 0.23 | 0.25 | 0.63 | 0.41 | 0.52 | ND | ND | | | |
| AD-21113-b2 | 1.11 | 0.93 | 1.02 | 0.99 | 0.89 | 0.94 | ND | ND | | | |
| AD-24210-b1 | 1.94 | 1.76 | 1.85 | 1.24 | 1.21 | 1.23 | ND | ND | | | |
| AD-24211-b1 | 0.39 | 0.42 | 0.41 | 0.67 | 0.59 | 0.63 | ND | ND | | | |
| AD-24212-b1 | 0.66 | 0.62 | 0.64 | 0.83 | 0.82 | 0.82 | ND | ND | | | |
| AD-24213-b1 | 0.65 | 0.76 | 0.71 | 0.80 | 0.84 | 0.82 | ND | ND | | | |
| AD-24214-b1 | 0.29 | 0.23 | 0.26 | 0.66 | 0.57 | 0.61 | ND | ND | | | |
| AD-24215-b1 | 0.79 | 0.75 | 0.77 | 0.85 | 0.81 | 0.83 | ND | ND | | | |
| AD-24216-b1 | 0.63 | 0.64 | 0.64 | 0.84 | 0.79 | 0.82 | ND | ND | | | |
| AD-24217-b1 | 0.66 | 0.67 | 0.66 | 0.84 | 0.77 | 0.81 | ND | ND | | | |
| AD-24218-b1 | 0.30 | 0.30 | 0.30 | 0.67 | 0.54 | 0.61 | ND | ND | | | |
| AD-24219-b1 | 0.52 | 0.56 | 0.54 | 0.84 | 0.77 | 0.80 | ND | ND | | | |
| AD-24220-b1 | 0.56 | 0.48 | 0.52 | 0.83 | 0.67 | 0.75 | ND | ND | | | |
| AD-24221-b1 | 1.10 | 1.06 | 1.08 | 1.00 | 0.92 | 0.96 | ND | ND | | | |
| AD-24222-b1 | 1.09 | 1.02 | 1.06 | 0.97 | 0.94 | 0.95 | ND | ND | | | |
| AD-24223-b1 | 0.97 | 0.93 | 0.95 | 0.91 | 0.89 | 0.90 | ND | ND | | | |
| AD-24224-b1 | 0.97 | 0.94 | 0.95 | 0.89 | 0.93 | 0.91 | ND | ND | | | |
| AD-24225-b1 | 0.76 | 0.76 | 0.76 | 0.84 | 0.86 | 0.85 | ND | ND | | | |
| AD-24226-b1 | 0.69 | 0.73 | 0.71 | 0.79 | 0.78 | 0.78 | ND | ND | | | |
| AD-24227-b1 | 0.80 | 0.84 | 0.82 | 0.87 | 0.86 | 0.86 | ND | ND | | | |
| AD-24228-b1 | 0.51 | 0.53 | 0.52 | 0.82 | 0.76 | 0.79 | ND | ND | | | |
| AD-24229-b1 | 0.72 | 0.75 | 0.74 | 0.96 | 0.85 | 0.91 | ND | ND | | | |
| AD-24230-b1 | 0.16 | 0.16 | 0.16 | 0.40 | 0.36 | 0.38 | ND | ND | 0.164 | 0.032 | 0.009 |
| AD-24231-b1 | 0.36 | 0.36 | 0.36 | 0.60 | 0.48 | 0.54 | ND | ND | | | |
| AD-24232-b1 | 0.84 | 0.77 | 0.80 | 0.84 | 0.85 | 0.84 | ND | ND | | | |
| AD-24233-b1 | 0.30 | 0.29 | 0.29 | 0.60 | 0.54 | 0.57 | ND | ND | | | |
| AD-24234-b1 | 0.63 | 0.63 | 0.63 | 0.80 | 0.89 | 0.85 | ND | ND | | | |
| AD-24235-b1 | 0.43 | 0.48 | 0.45 | 0.66 | 0.60 | 0.63 | ND | ND | | | |
| AD-24236-b1 | 0.76 | 0.70 | 0.73 | 0.82 | 0.70 | 0.76 | ND | ND | | | |
| AD-24237-b1 | 0.62 | 0.73 | 0.68 | 0.90 | 0.77 | 0.83 | ND | ND | | | |
| AD-24238-b1 | 0.67 | 0.67 | 0.67 | 0.87 | 0.80 | 0.84 | ND | ND | | | |
| AD-24239-b1 | 0.54 | 0.64 | 0.59 | 0.91 | 0.76 | 0.84 | ND | ND | | | |
| AD-24240-b1 | 0.62 | 0.73 | 0.68 | 0.88 | 0.61 | 0.74 | ND | ND | | | |
| AD-24241-b1 | 0.31 | 0.36 | 0.33 | 0.17 | 0.53 | 0.35 | ND | ND | 0.383 | 0.282 | 0.180 |
| AD-24242-b1 | 0.54 | 0.62 | 0.58 | 0.79 | 0.63 | 0.71 | ND | ND | | | |
| AD-24243-b1 | 0.79 | 0.78 | 0.78 | 0.74 | 0.79 | 0.77 | ND | ND | | | |
| AD-24244-b1 | 0.90 | 1.10 | 1.00 | 0.86 | 0.83 | 0.84 | ND | ND | | | |
| AD-24245-b1 | 0.76 | 0.94 | 0.85 | 0.99 | 0.86 | 0.92 | ND | ND | | | |
| AD-24455-b1 | 0.33 | 0.34 | 0.34 | 0.66 | 0.73 | 0.69 | ND | ND | | | |
| AD-24456-b1 | 0.59 | 0.68 | 0.64 | 0.72 | 0.66 | 0.69 | ND | ND | | | |
| AD-24457-b1 | 0.71 | 0.82 | 0.76 | 0.73 | 0.84 | 0.78 | ND | ND | | | |
| AD-24458-b1 | 0.59 | 0.55 | 0.57 | 0.69 | 0.68 | 0.69 | ND | ND | | | |
| AD-24459-b1 | 0.81 | 0.86 | 0.83 | 0.77 | 0.98 | 0.87 | ND | ND | | | |
| AD-24460-b1 | 1.25 | 1.12 | 1.18 | 1.04 | 1.12 | 1.08 | ND | ND | | | |
| AD-24461-b1 | 0.79 | 0.85 | 0.82 | 0.86 | 0.91 | 0.89 | ND | ND | | | |
| AD-24462-b1 | 0.82 | 0.88 | 0.85 | 0.90 | 0.93 | 0.91 | ND | ND | | | |
| AD-24463-b1 | 0.97 | 0.98 | 0.98 | 0.86 | 0.98 | 0.92 | ND | ND | | | |
| AD-24464-b1 | 0.73 | 0.85 | 0.79 | 0.88 | 0.82 | 0.85 | ND | ND | | | |
| AD-24465-b1 | 0.97 | 1.00 | 0.99 | 0.82 | 0.95 | 0.89 | ND | ND | | | |
| AD-24466-b1 | 0.78 | 0.83 | 0.81 | 0.86 | 0.84 | 0.85 | ND | ND | | | |
| AD-24467-b1 | 0.26 | 0.27 | 0.26 | 0.37 | 0.45 | 0.41 | ND | ND | 0.283 | 0.112 | 0.115 |
| AD-24468-b1 | 0.59 | 0.63 | 0.61 | 0.58 | 0.73 | 0.66 | ND | ND | | | |
| AD-24469-b1 | 0.76 | 0.77 | 0.76 | 0.76 | 0.74 | 0.75 | ND | ND | | | |
| AD-24470-b1 | 0.28 | 0.35 | 0.32 | 0.54 | 0.59 | 0.56 | ND | ND | | | |
| AD-24471-b1 | 0.46 | 0.54 | 0.50 | 0.70 | 0.78 | 0.74 | ND | ND | | | |
| AD-24472-b1 | 0.37 | 0.36 | 0.37 | 0.53 | 0.59 | 0.56 | ND | ND | | | |
| AD-24473-b1 | 1.00 | 0.96 | 0.98 | 0.95 | 1.03 | 0.99 | ND | ND | | | |
| AD-24474-b1 | 0.39 | 0.40 | 0.39 | 0.58 | 0.64 | 0.61 | ND | ND | | | |
| AD-24475-b1 | 0.56 | 0.59 | 0.57 | 0.74 | 0.82 | 0.78 | ND | ND | | | |
| AD-24476-b1 | 0.15 | 0.19 | 0.17 | 0.47 | 0.48 | 0.47 | ND | ND | 0.428 | 0.111 | 0.039 |
| AD-24477-b1 | 0.32 | 0.33 | 0.33 | 0.55 | 0.65 | 0.60 | ND | ND | | | |
| AD-24478-b1 | 0.81 | 0.78 | 0.79 | 0.88 | 0.87 | 0.88 | ND | ND | | | |
| AD-24479-b1 | 0.51 | 0.51 | 0.51 | 0.55 | 0.74 | 0.64 | ND | ND | | | |
| AD-24480-b1 | 0.50 | 0.48 | 0.49 | 0.50 | 0.59 | 0.54 | ND | ND | | | |
| AD-24481-b1 | 0.36 | 0.40 | 0.38 | 0.49 | 0.62 | 0.56 | ND | ND | | | |
| AD-24482-b1 | 0.23 | 0.29 | 0.26 | 0.54 | 0.73 | 0.63 | ND | ND | | | |
| AD-24483-b1 | 0.16 | 0.21 | 0.18 | 0.46 | 0.53 | 0.49 | ND | ND | 0.509 | 0.132 | 0.087 |
| AD-24484-b1 | 0.63 | 0.73 | 0.68 | 0.74 | 0.97 | 0.86 | ND | ND | | | |
| AD-24485-b1 | 0.54 | 0.61 | 0.58 | 0.59 | 0.75 | 0.67 | ND | ND | | | |
| AD-24486-b1 | 0.32 | 0.44 | 0.38 | 0.48 | 0.63 | 0.55 | ND | ND | | | |
| AD-24487-b1 | 0.11 | 0.14 | 0.13 | 0.26 | 0.28 | 0.27 | ND | ND | 0.939 | 0.013 | 0.011 |
| AD-24488-b1 | 0.29 | 0.37 | 0.33 | 0.50 | 0.61 | 0.56 | ND | ND | | | |
| AD-24489-b1 | 0.37 | 0.47 | 0.42 | 0.53 | 0.67 | 0.60 | ND | ND | | | |
| AD-24490-b1 | 0.60 | 0.53 | 0.57 | 0.65 | 0.73 | 0.69 | ND | ND | | | |
| AD-24491-b1 | 0.84 | 0.85 | 0.84 | 0.73 | 0.90 | 0.81 | ND | ND | | | |
| AD-24492-b1 | 0.43 | 0.49 | 0.46 | 0.42 | 0.51 | 0.46 | ND | ND | | | |
| AD-24493-b1 | 0.64 | 0.69 | 0.67 | 0.63 | 0.67 | 0.65 | ND | ND | | | |
| AD-24494-b1 | 0.29 | 0.37 | 0.33 | 0.42 | 0.49 | 0.45 | ND | ND | | | |
| AD-24495-b1 | 0.24 | 0.29 | 0.26 | 0.32 | 0.39 | 0.35 | ND | ND | 0.161 | 0.056 | 0.037 |
| AD-24496-b1 | 0.13 | 0.20 | 0.17 | 0.33 | 0.33 | 0.33 | ND | ND | 0.143 | 0.007 | 0.001 |
| AD-24497-b1 | 0.65 | 0.67 | 0.66 | 0.68 | 0.75 | 0.71 | ND | ND | | | |
| AD-24498-b1 | 0.69 | 0.72 | 0.70 | 0.72 | 0.88 | 0.80 | ND | ND | | | |
| AD-24499-b1 | 0.52 | 0.61 | 0.57 | 0.58 | 0.72 | 0.65 | ND | ND | | | |
| AD-24500-b1 | 0.85 | 0.93 | 0.89 | 0.86 | 0.83 | 0.85 | ND | ND | | | |
| AD-24501-b1 | 0.84 | 0.91 | 0.87 | 0.82 | 0.90 | 0.86 | ND | ND | | | |
| AD-24502-b1 | 0.60 | 0.67 | 0.63 | 0.77 | 0.81 | 0.79 | ND | ND | | | |
| AD-24503-b1 | 0.84 | 0.88 | 0.86 | 0.76 | 0.95 | 0.86 | ND | ND | | | |
| AD-24504-b1 | 0.37 | 0.44 | 0.40 | 0.55 | 0.60 | 0.58 | ND | ND | | | |
| AD-24505-b1 | 0.69 | 0.70 | 0.70 | 0.70 | 0.87 | 0.79 | ND | ND | | | |
| AD-24506-b1 | 0.31 | 0.33 | 0.32 | 0.40 | 0.51 | 0.46 | ND | ND | | | |
| AD-24507-b1 | 0.38 | 0.55 | 0.46 | 0.45 | 0.61 | 0.53 | ND | ND | | | |
| AD-24508-b1 | 0.64 | 0.70 | 0.67 | 0.69 | 0.77 | 0.73 | ND | ND | | | |
| AD-24509-b1 | 0.84 | 0.76 | 0.80 | 0.72 | 0.81 | 0.76 | ND | ND | | | |
| AD-24510-b1 | 0.83 | 0.93 | 0.88 | 0.78 | 0.87 | 0.82 | ND | ND | | | |
| AD-24511-b1 | 0.44 | 0.50 | 0.47 | 0.61 | 0.68 | 0.64 | ND | ND | | | |
| AD-24512-b1 | 0.26 | 0.28 | 0.27 | 0.37 | 0.42 | 0.39 | ND | ND | 0.308 | 0.046 | 0.026 |
| AD-24513-b1 | 0.36 | 0.39 | 0.37 | 0.40 | 0.53 | 0.47 | ND | ND | | | |
| AD-24514-b1 | 0.37 | 0.36 | 0.36 | 0.46 | 0.44 | 0.45 | ND | ND | | | |
| AD-24515-b1 | 0.35 | 0.31 | 0.33 | 0.39 | 0.46 | 0.43 | ND | ND | | | |
| AD-24516-b1 | 0.21 | 0.29 | 0.25 | 0.29 | 0.35 | 0.32 | ND | ND | 0.104 | 0.024 | 0.015 |
| AD-24517-b1 | 0.19 | 0.21 | 0.20 | 0.23 | 0.28 | 0.25 | ND | ND | 0.021 | 0.005 | 0.003 |
| AD-24518-b1 | 0.21 | 0.32 | 0.27 | 0.29 | 0.30 | 0.30 | ND | ND | 0.049 | 0.010 | 0.009 |
| AD-24519-b1 | 0.32 | 0.30 | 0.31 | 0.42 | 0.34 | 0.38 | ND | ND | 4.481 | 0.052 | 0.115 |
| AD-24520-b1 | 0.38 | 0.42 | 0.40 | 0.47 | 0.51 | 0.49 | ND | ND | | | |
| AD-24521-b1 | 0.45 | 0.48 | 0.47 | 0.46 | 0.56 | 0.51 | ND | ND | | | |
| AD-24522-b1 | 0.37 | 0.39 | 0.38 | 0.42 | 0.36 | 0.39 | ND | ND | 0.219 | 0.051 | 0.045 |
| AD-24523-b1 | 0.60 | 0.58 | 0.59 | 0.60 | 0.67 | 0.64 | ND | ND | | | |
| AD-24524-b1 | 0.33 | 0.40 | 0.36 | 0.42 | 0.48 | 0.45 | ND | ND | | | |
| AD-24525-b1 | 0.51 | 0.53 | 0.52 | 0.56 | 0.67 | 0.62 | ND | ND | | | |
| AD-24526-b1 | 0.52 | 0.53 | 0.53 | 0.75 | 0.88 | 0.81 | ND | ND | | | |
| AD-24527-b1 | 0.65 | 0.68 | 0.66 | 0.62 | 0.65 | 0.63 | ND | ND | | | |

TABLE 5
Human CD274/PD-L1 Sing1e Strands and Duplex Sequences

| | | SEQ | Sense (s) | | SEQ | | |
|---|---|---|---|---|---|---|---|
| Duplex | Duplex | ID | Oligo- | Sense | ID | | |
| Name [symbol] | Idx [symbol] | NO: [symbol] | Name [symbol] | OligoSeq [symbol] | NO: [symbol] | asOligoName [symbol] | asOligoSeq [symbol] |
| AD- | 13430449 | 877 [symbol] | A- | uGAAuAuAucuuAAcG | 901 [symbol] | A-67872.1 [symbol] | UGGCGUuAAGAuAu |
| 31053.1 [symbol] | | | 67871.1 [symbol] | ccAdTsdT [symbol] | | | AUUcAdTsdT [symbol] |
| AD- | 13430466 | 878 | A- | GcuAGAAAGAAuccuG | 902 | A-67874.1 | ACCcAGGAUUCUUU |
| 31054.1 | | | 67873.1 | GGudTsdT | | | CuAGCdTsdT |
| AD- | 13430483 | 879 | A- | GGAGcuAcuGcAuGuu | 903 | A-67876.1 | AUcAAcAUGcAGuA |
| 31055.1 | | | 67875.1 | GAudTsdT | | | GCUCCdTsdT |
| AD- | 13430500 | 880 | A- | AGuccucAuAucAAAu | 904 | A-67878.1 | UGuAUUUGAuAUGA |
| 31056.1 | | | 67877.1 | AcAdTsdT | | | GGACUdTsdT |
| AD- | 13430517 | 881 | A- | ucAuAucAAAuAcAGA | 905 | A-67880.1 | UGUUCUGuAUUUGA |
| 31057.1 | | | 67879.1 | AcAdTsdT | | | uAUGAdTsdT |
| AD- | 13430534 | 882 | A- | cAuAucAAAuAcAGAA | 906 | A-67882.1 | AUGUUCUGuAUUUG |
| 31058.1 | | | 67881.1 | cAudTsdT | | | AuAUGdTsdT |
| AD- | 13430551 | 883 | A- | uccuGcuAAuGuuGAG | 907 | A-67884.1 | AGGCUcAAcAUuAG |
| 31059.1 | | | 67883.1 | ccudTsdT | | | cAGGAdTsdT |
| AD- | 13430568 | 884 | A- | GcuAAuGuuGAGccuG | 908 | A-67886.1 | UUCcAGGCUcAAcA |
| 31060.1 | | | 67885.1 | GAAdTsdT | | | UuAGCdTsdT |
| AD- | 13430585 | 885 | A- | ucccuAAGGAAcuGuA | 909 | A-67888.1 | AUGuAcAGUUCCUu |
| 31061.1 | | | 67887.1 | cAudTsdT | | | AGGGAdTsdT |
| AD- | 13430602 | 886 | A- | cccuAAGGAAcuGuAc | 910 | A-67890.1 | uAUGuAcAGUUCCU |
| 31062.1 | | | 67889.1 | AuAdTsdT | | | uAGGGdTsdT |
| AD- | 13430619 | 887 | A- | uAcAuAAuAGAGcAuG | 911 | A-67892.1 | UGCcAUGCUCuAUu |
| 31063.1 | | | 67891.1 | GcAdTsdT | | | AUGuAdTsdT |
| AD- | 13430636 | 888 | A- | AuAAuAGAGcAuGGcA | 912 | A-67894.1 | UGCUGCcAUGCUCu |
| 31064.1 | | | 67893.1 | GcAdTsdT | | | AUuAUdTsdT |
| AD- | 13430653 | 889 | A- | uAALAGAGcAuGGcAG | 913 | A-67896.1 | UUGCUGCcAUGCUC |
| 31065.1 | | | 67895.1 | cAAdTsdT | | | uAUuAdTsdT |
| AD- | 13430670 | 890 | A- | AAuAGAGcAuGGcAGc | 914 | A-67898.1 | AUUGCUGCcAUGCU |
| 31066.1 | | | 67897.1 | AAudTsdT | | | CuAUUdTsdT |
| AD- | 13430687 | 891 | A- | GAccouGGAAuGcAAc | 915 | A-67900.1 | AAAGUUGcAUUCcA |
| 31067.1 | | | 67899.1 | uuudTsdT | | | GGGUCdTsdT |
| AD- | 13430704 | 892 | A- | cAAuAAcAGccAGuuu | 916 | A-67902.1 | UGcAAACUGGCUGU |
| 31068.1 | | | 67901.1 | GcAdTsdT | | | uAUUGdTsdT |
| AD- | 13430721 | 893 | A- | AuAAcAGccAGuuuGc | 917 | A-67904.1 | UUUGcAAACUGGCU |
| 31069.1 | | | 67903.1 | AAAdTsdT | | | GUuAUdTsdT |
| AD- | 13430738 | 894 | A- | uccAcAuAccucAAGu | 918 | A-67906.1 | UGGACUUGAGGuAU |
| 31070.1 | | | 67905.1 | ccAdTsdT | | | GUGGAdTsdT |
| AD- | 13430755 | 895 | A- | AccAAuGcAuAAucAu | 919 | A-67908.1 | uAGAUGAUuAUGcA |
| 31071.1 | | | 67907.1 | cuAdTsdT | | | UUGGUdTsdT |
| AD- | 13430772 | 896 | A- | GGAcuAcAAGuAccuG | 920 | A-67910.1 | AGUcAGGuACUUGu |
| 31072.1 | | | 67909.1 | AcudTsdT | | | AGUCCdTsdT |
| AD- | 13430789 | 897 | A- | AcuAcAAGuAccuGAc | 921 | A-67912.1 | AGAGUcAGGuACUU |
| 31073.1 | | | 67911.1 | ucudTsdT | | | GuAGUdTsdT |
| AD- | 13430806 | 898 | A- | GucAAAGcuuccuAcA | 922 | A-67914.1 | UCCUGuAGGAAGCU |
| 31074.1 | | | 67913.1 | GGAdTsdT | | | UUGACdTsdT |
| AD- | 13430823 | 899 | A- | cAcucAcAuccuAAAG | 923 | A-67916.1 | AACCUUuAGGAUGU |
| 31075.1 | | | 67915.1 | GuudTsdT | | | GAGUGdTsdT |
| AD- | 13430840 | 900 | A- | ucAcAuccuAAAGGuu | 924 | A-67918.1 | UGGAACCUUuAGGA |
| 31076.1 | | | 67917.1 | ccAdTsdT | | | UGUGAdTsdT |

[symbol]

indicates data missing or illegible when filed

We claim:

1. A double-stranded ribonucleic acid (dsRNA) for inhibiting expression of CD274/PD-L1, wherein said dsRNA comprises a sense strand and an antisense strand, wherein the sense strand comprises at least 15 contiguous nucleotides differing by no more than 3 nucleotides from the nucleotide sequence of SEQ ID NO: 415 and the antisense strand comprises at least 15 contiguous nucleotides differing by no more than 3 nucleotides from the corresponding antisense nucleotide sequence of SEQ ID NO: 416.

2. A double-stranded ribonucleic acid (dsRNA) for inhibiting expression of CD274/PD-L1, wherein said dsRNA comprises a sense strand and an antisense strand, the antisense strand comprising a region of complementarity to a CD274/PD-L1 RNA transcript, which comprises at least 15 contiguous nucleotides differing by no more than 3 nucleotides from one of the antisense sequences listed in Table 2, Table 3, or Table 5.

3. The dsRNA of claim 2, wherein said dsRNA comprises at least one modified nucleotide.

4. The dsRNA of claim 3, wherein at least one of said modified nucleotides is chosen from the group consisting of: a 2′-O-methyl modified nucleotide, a nucleotide comprising a 5′-phosphorothioate group, and a terminal nucleotide linked to a cholesteryl derivative or dodecanoic acid bisdecylamide group.

5. The dsRNA of claim 3, wherein said modified nucleotide is chosen from the group consisting of: a 2′-deoxy-2′-fluoro modified nucleotide, a 2′-deoxy-modified nucleotide, a locked nucleotide, an abasic nucleotide, 2′-amino-modified nucleotide, 2′-alkyl-modified nucleotide, morpholino nucleotide, a phosphoramidate, and a non-natural base comprising nucleotide.

6. The dsRNA of a claim 2, wherein the region of complementarity is between 19 and 21 nucleotides in length.

7. The dsRNA of claim 6, wherein the region of complementarity is 19 nucleotides in length.

8. The dsRNA of claim 2, wherein each strand is no more than 30 nucleotides in length.

9. The dsRNA of claim 2, wherein at least one strand comprises a 3′ overhang of at least 1 nucleotide.

10. The dsRNA of claim 2, wherein at least one strand comprises a 3′ overhang of at least 2 nucleotides.

11. The dsRNA of claim 2, further comprising a ligand.

12. The dsRNA of claim 2, wherein the region of complementarity consists of one of the antisense sequences of Table 2, Table 3, or Table 5.

13. The dsRNA of claim 2, wherein the sense strand consists of SEQ ID NO: 415 and the antisense strand consists of SEQ ID NO: 416.

14. The dsRNA of claim 2, wherein the sense strand consists of SEQ ID NO: 371 and the antisense strand consists of SEQ ID NO: 372.

15. The dsRNA of claim 2, wherein the dsRNA comprises a sense strand consisting of a sense strand sequence selected from Table 2, Table 3, or Table 5, and an antisense strand consisting of an antisense sequence selected from Table 2, Table 3, or Table 5.

16. A cell containing the dsRNA of claim 2.

17. The dsRNA of claim 2, further comprising a pharmaceutically acceptable carrier.

18. A method of inhibiting CD274/PD-L1 expression in a cell, the method comprising:
(a) introducing into the cell a double-stranded ribonucleic acid (dsRNA) for inhibiting expression of CD274/PD-L1, wherein said dsRNA comprises a sense strand and an antisense strand, the antisense strand comprising a region of complementarity to a CD274/PD-L1 RNA transcript, which comprises at least 15 contiguous nucleotides differing by no more than 3 nucleotides from one of the antisense sequences listed in Table 2, Table 3, or Table 5; and
(b) maintaining the cell produced in step (a) for a time sufficient to obtain degradation of the mRNA transcript of a CD274/PD-L1 gene, thereby inhibiting expression of the CD274/PD-L1 gene in the cell.

19. A method of treating a disorder mediated by CD274/PD-L1 expression comprising administering to a human in need of such treatment a therapeutically effective amount of a pharmaceutical composition comprising a double-stranded ribonucleic acid (dsRNA) for inhibiting expression of CD274/PD-L1, wherein said dsRNA comprises a sense strand and an antisense strand, the antisense strand comprising a region of complementarity to a CD274/PD-L1 RNA transcript, which comprises at least 15 contiguous nucleotides differing by no more than 3 nucleotides from one of the antisense sequences listed in Table 2, Table 3, or Table 5, and a pharmaceutically acceptable carrier.

20. A vector encoding a dsRNA that targets a CD274/PD-L1 mRNA for cleavage, the dsRNA comprising on one strand a region of complementarity to said CD274/PD-L1 mRNA, the region of complementarity providing a double-stranded region of said dsRNA of 30 base pairs or less in length.

The application's sequence listing, which the Patent Office published only in electronic form, follows.

SEQUENCE LISTING (925 sequences)

SEQ ID NO: 1 - protein, 16 aa, synthetic construct
  REGION 1..16: note = Description of Artificial Sequence: Synthetic peptide
AAVALLPAVLLALLAP

SEQ ID NO: 2 - protein, 11 aa, synthetic construct
  REGION 1..11: note = Description of Artificial Sequence: Synthetic peptide
AALLPVLLAAP

SEQ ID NO: 3 - protein, 13 aa, Human immunodeficiency virus
GRKKRRQRRRPPQ

SEQ ID NO: 4 - protein, 16 aa, Drosophila melanogaster
RQIKIWFQNRRMKWKK

SEQ ID NO: 5 - RNA, 19 nt, synthetic construct
  source 1..19: mol_type = other RNA
  modified_base 19: mod_base = OTHER; note = uridine-3'-phosphate
cgactacaagcgaattact

SEQ ID NO: 6 - RNA, 19 nt, synthetic construct
  source 1..19: mol_type = other RNA
  modified_base 19: mod_base = OTHER; note = guanosine-3'-phosphate
agtaattcgcttgtagtcg

SEQ ID NO: 7 - RNA, 19 nt, synthetic construct
  source 1..19: mol_type = other RNA
  modified_base 19: mod_base = OTHER; note = adenosine-3'-phosphate
tcctaggaagacgggttga

SEQ ID NO: 8 - RNA, 19 nt, synthetic construct
  source 1..19: mol_type = other RNA
  modified_base 19: mod_base = OTHER; note = adenosine-3'-phosphate
tcaacccgtcttcctagga

SEQ ID NO: 9 - RNA, 19 nt, synthetic construct
  source 1..19: mol_type = other RNA
  modified_base 19: mod_base = OTHER; note = uridine-3'-phosphate
gtgccgactacaagcgaat

SEQ ID NO: 10 - RNA, 19 nt, synthetic construct
  source 1..19: mol_type = other RNA
  modified_base 19: mod_base = OTHER; note = cytidine-3'-phosphate
attcgcttgtagtcggcac

SEQ ID NO: 11 - RNA, 19 nt, synthetic construct
  source 1..19: mol_type = other RNA
  modified_base 19: mod_base = OTHER; note = cytidine-3'-phosphate
ccgactacaagcgaattac

SEQ ID NO: 12 - RNA, 19 nt, synthetic construct
  source 1..19: mol_type = other RNA
  modified_base 19: mod_base = OTHER; note = guanosine-3'-phosphate
gtaattcgcttgtagtcgg

SEQ ID NO: 13 - RNA, 19 nt, synthetic construct
  source 1..19: mol_type = other RNA
  modified_base 19: mod_base = OTHER; note = adenosine-3'-phosphate
gccgactacaagcgaatta

SEQ ID NO: 14 - RNA, 19 nt, synthetic construct
  source 1..19: mol_type = other RNA
  modified_base 19: mod_base = OTHER; note = cytidine-3'-phosphate
taattcgcttgtagtcggc

SEQ ID NO: 15 - RNA, 19 nt, synthetic construct
  source 1..19: mol_type = other RNA
  modified_base 19: mod_base = OTHER; note = guanosine-3'-phosphate
gtttaggggttcatcgggg

SEQ ID NO: 16 - RNA, 19 nt, synthetic construct
  source 1..19: mol_type = other RNA
  modified_base 19: mod_base = OTHER; note = cytidine-3'-phosphate
ccccgatgaacccctaaac

SEQ ID NO: 17 - RNA, 19 nt, synthetic construct
  source 1..19: mol_type = other RNA
  modified_base 19: mod_base = OTHER; note = cytidine-3'-phosphate
gatgttacaattttgtcgc

SEQ ID NO: 18 - RNA, 19 nt, synthetic construct
  source 1..19: mol_type = other RNA
  modified_base 19: mod_base = OTHER; note = cytidine-3'-phosphate
gcgacaaaattgtaacatc

SEQ ID NO: 19 - RNA, 19 nt, synthetic construct
  source 1..19: mol_type = other RNA
  modified_base 19: mod_base = OTHER; note = cytidine-3'-phosphate
gcatttactgtcacggttc

SEQ ID NO: 20 - RNA, 19 nt, synthetic construct
  source 1..19: mol_type = other RNA
  modified_base 19: mod_base = OTHER; note = cytidine-3'-phosphate
gaaccgtgacagtaaatgc

SEQ ID NO: 21 - RNA, 19 nt, synthetic construct
  source 1..19: mol_type = other RNA
  modified_base 19: mod_base = OTHER; note = uridine-3'-phosphate
gagccatcttattatgcct

SEQ ID NO: 22 - RNA, 19 nt, synthetic construct
  source 1..19: mol_type = other RNA
  modified_base 19: mod_base = OTHER; note = cytidine-3'-phosphate
aggcataataagatggctc

SEQ ID NO: 23 - RNA, 19 nt, synthetic construct
  source 1..19: mol_type = other RNA
  modified_base 19: mod_base = OTHER; note = guanosine-3'-phosphate
agtctcagtgttggaacgg

SEQ ID NO: 24 - RNA, 19 nt, synthetic construct
  source 1..19: mol_type = other RNA
  modified_base 19: mod_base = OTHER; note = uridine-3'-phosphate
ccgttccaacactgagact

SEQ ID NO: 25 - RNA, 19 nt, synthetic construct
  source 1..19: mol_type = other RNA
  modified_base 19: mod_base = OTHER; note = cytidine-3'-phosphate
cttttaggagattagatcc

SEQ ID NO: 26 - RNA, 19 nt, synthetic construct
  source 1..19: mol_type = other RNA
  modified_base 19: mod_base = OTHER; note = guanosine-3'-phosphate
ggatctaatctcctaaaag

SEQ ID NO: 27 - RNA, 19 nt, synthetic construct
  source 1..19: mol_type = other RNA
  modified_base 19: mod_base = OTHER; note = adenosine-3'-phosphate
atggaacctggcgaaagca

SEQ ID NO: 28 - RNA, 19 nt, synthetic construct
  source 1..19: mol_type = other RNA
  modified_base 19: mod_base = OTHER; note = uridine-3'-phosphate
tgctttcgccaggttccat

SEQ ID NO: 29 - RNA, 19 nt, synthetic construct
  source 1..19: mol_type = other RNA
  modified_base 19: mod_base = OTHER; note = cytidine-3'-phosphate
ctaccccaaggccgaagtc

SEQ ID NO: 30 - RNA, 19 nt, synthetic construct
  source 1..19: mol_type = other RNA
  modified_base 19: mod_base = OTHER; note = guanosine-3'-phosphate
gacttcggccttggggtag

SEQ ID NO: 31 - RNA, 19 nt, synthetic construct
  source 1..19: mol_type = other RNA
  modified_base 19: mod_base = OTHER; note = guanosine-3'-phosphate
tggaacctggcgaaagcag

SEQ ID NO: 32 - RNA, 19 nt, synthetic construct
  source 1..19: mol_type = other RNA
  modified_base 19: mod_base = OTHER; note = adenosine-3'-phosphate
ctgctttcgccaggttcca

SEQ ID NO: 33 - RNA, 19 nt, synthetic construct
  source 1..19: mol_type = other RNA
  modified_base 19: mod_base = OTHER; note = adenosine-3'-phosphate
tatgtggtagagtatggta

SEQ ID NO: 34 - RNA, 19 nt, synthetic construct
  source 1..19: mol_type = other RNA
  modified_base 19: mod_base = OTHER; note = adenosine-3'-phosphate
taccatactctaccacata

SEQ ID NO: 35 - RNA, 19 nt, synthetic construct
  source 1..19: mol_type = other RNA
  modified_base 19: mod_base = OTHER; note = cytidine-3'-phosphate
tggtcatcccagaactacc

SEQ ID NO: 36 - RNA, 19 nt, synthetic construct
  source 1..19: mol_type = other RNA
  modified_base 19: mod_base = OTHER; note = adenosine-3'-phosphate
ggtagttctgggatgacca

SEQ ID NO: 37 - RNA, 19 nt, synthetic construct
  source 1..19: mol_type = other RNA
  modified_base 19: mod_base = OTHER; note = cytidine-3'-phosphate
catttactgtcacggttcc

SEQ ID NO: 38 - RNA, 19 nt, synthetic construct
  source 1..19: mol_type = other RNA
  modified_base 19: mod_base = OTHER; note = guanosine-3'-phosphate
ggaaccgtgacagtaaatg

SEQ ID NO: 39 - RNA, 19 nt, synthetic construct
  source 1..19: mol_type = other RNA
  modified_base 19: mod_base = OTHER; note = cytidine-3'-phosphate
ggagccatcttattatgcc

SEQ ID NO: 40 - RNA, 19 nt, synthetic construct
  source 1..19: mol_type = other RNA
  modified_base 19: mod_base = OTHER; note = cytidine-3'-phosphate
ggcataataagatggctcc

SEQ ID NO: 41 - RNA, 19 nt, synthetic construct
  source 1..19: mol_type = other RNA
  modified_base 19: mod_base = OTHER; note = guanosine-3'-phosphate
gactacaagcgaattactg

SEQ ID NO: 42 - RNA, 19 nt, synthetic construct
  source 1..19: mol_type = other RNA
  modified_base 19: mod_base = OTHER; note = cytidine-3'-phosphate
cagtaattcgcttgtagtc

SEQ ID NO: 43 - RNA, 19 nt, synthetic construct
  source 1..19: mol_type = other RNA
  modified_base 19: mod_base = OTHER; note = adenosine-3'-phosphate
catacagctgaattggtca

SEQ ID NO: 44 - RNA, 19 nt, synthetic construct
  source 1..19: mol_type = other RNA
  modified_base 19: mod_base = OTHER; note = guanosine-3'-phosphate
tgaccaattcagctgtatg

SEQ ID NO: 45 - RNA, 19 nt, synthetic construct
  source 1..19: mol_type = other RNA
  modified_base 19: mod_base = OTHER; note = guanosine-3'-phosphate
gcactaattgtctattggg

SEQ ID NO: 46 - RNA, 19 nt, synthetic construct
  source 1..19: mol_type = other RNA
  modified_base 19: mod_base = OTHER; note = cytidine-3'-phosphate
cccaatagacaattagtgc

SEQ ID NO: 47 - RNA, 19 nt, synthetic construct
  source 1..19: mol_type = other RNA
  modified_base 19: mod_base = OTHER; note = cytidine-3'-phosphate
tttaggggttcatcggggc

SEQ ID NO: 48 - RNA, 19 nt, synthetic construct
  source 1..19: mol_type = other RNA
  modified_base 19: mod_base = OTHER; note = adenosine-3'-phosphate
gccccgatgaacccctaaa

SEQ ID NO: 49 - RNA, 19 nt, synthetic construct
  source 1..19: mol_type = other RNA
  modified_base 19: mod_base = OTHER; note = guanosine-3'-phosphate
ctcaacctgtggtttaggg

SEQ ID NO: 50 - RNA, 19 nt, synthetic construct
  source 1..19: mol_type = other RNA
  modified_base 19: mod_base = OTHER; note = guanosine-3'-phosphate
ccctaaaccacaggttgag

SEQ ID NO: 51 - RNA, 19 nt, synthetic construct
  source 1..19: mol_type = other RNA
  modified_base 19: mod_base = OTHER; note = uridine-3'-phosphate
cctaatttgagggtcagtt

SEQ ID NO: 52 - RNA, 19 nt, synthetic construct
  source 1..19: mol_type = other RNA
  modified_base 19: mod_base = OTHER; note = guanosine-3'-phosphate
aactgaccctcaaattagg

SEQ ID NO: 53 - RNA, 19 nt, synthetic construct
  source 1..19: mol_type = other RNA
  modified_base 19: mod_base = OTHER; note = guanosine-3'-phosphate
tctcaacctgtggtttagg

SEQ ID NO: 54 - RNA, 19 nt, synthetic construct
  source 1..19: mol_type = other RNA
  modified_base 19: mod_base = OTHER; note = adenosine-3'-phosphate
cctaaaccacaggttgaga

SEQ ID NO: 55 - RNA, 19 nt, synthetic construct
  source 1..19: mol_type = other RNA
  modified_base 19: mod_base = OTHER; note = guanosine-3'-phosphate
tttaggagattagatcctg

SEQ ID NO: 56 - RNA, 19 nt, synthetic construct
  source 1..19: mol_type = other RNA
  modified_base 19: mod_base = OTHER; note = adenosine-3'-phosphate
caggatctaatctcctaaa

SEQ ID NO: 57 - RNA, 19 nt, synthetic construct
  source 1..19: mol_type = other RNA
  modified_base 19: mod_base = OTHER; note = adenosine-3'-phosphate
ccattgctcatcctaggaa

SEQ ID NO: 58 - RNA, 19 nt, synthetic construct
  source 1..19: mol_type = other RNA
  modified_base 19: mod_base = OTHER; note = guanosine-3'-phosphate
ttcctaggatgagcaatgg

SEQ ID NO: 59 - RNA, 19 nt, synthetic construct
  source 1..19: mol_type = other RNA
  modified_base 19: mod_base = OTHER; note = guanosine-3'-phosphate
cccaaggacctatatgtgg

SEQ ID NO: 60 - RNA, 19 nt, synthetic construct
  source 1..19: mol_type = other RNA
  modified_base 19: mod_base = OTHER; note = guanosine-3'-phosphate
ccacatataggtccttggg

SEQ ID NO: 61 - RNA, 19 nt, synthetic construct
  source 1..19: mol_type = other RNA
  modified_base 19: mod_base = OTHER; note = adenosine-3'-phosphate
gacgggttgagaatcccta

SEQ ID NO: 62 - RNA, 19 nt, synthetic construct
  source 1..19: mol_type = other RNA
  modified_base 19: mod_base = OTHER; note = cytidine-3'-phosphate
tagggattctcaacccgtc

SEQ ID NO: 63 - RNA, 19 nt, synthetic construct
  source 1..19: mol_type = other RNA
  modified_base 19: mod_base = OTHER; note = uridine-3'-phosphate
gctgcactaattgtctatt

SEQ ID NO: 64 - RNA, 19 nt, synthetic construct
  source 1..19: mol_type = other RNA
  modified_base 19: mod_base = OTHER; note = cytidine-3'-phosphate
aatagacaattagtgcagc

SEQ ID NO: 65 - RNA, 19 nt, synthetic construct
  source 1..19: mol_type = other RNA
  modified_base 19: mod_base = OTHER; note = adenosine-3'-phosphate
ttactgtcacggttcccaa

SEQ ID NO: 66 - RNA, 19 nt, synthetic construct
  source 1..19: mol_type = other RNA
  modified_base 19: mod_base = OTHER; note = adenosine-3'-phosphate
ttgggaaccgtgacagtaa

SEQ ID NO: 67 - RNA, 19 nt, synthetic construct
  source 1..19: mol_type = other RNA
  modified_base 19: mod_base = OTHER; note = cytidine-3'-phosphate
ttggtcatcccagaactac

SEQ ID NO: 68 - RNA, 19 nt, synthetic construct
  source 1..19: mol_type = other RNA
  modified_base 19: mod_base = OTHER; note = adenosine-3'-phosphate
gtagttctgggatgaccaa

SEQ ID NO: 69 - RNA, 19 nt, synthetic construct
  source 1..19: mol_type = other RNA
  modified_base 19: mod_base = OTHER; note = guanosine-3'-phosphate
gtggtgccgactacaagcg

SEQ ID NO: 70 - RNA, 19 nt, synthetic construct
  source 1..19: mol_type = other RNA
  modified_base 19: mod_base = OTHER; note = cytidine-3'-phosphate
cgcttgtagtcggcaccac

SEQ ID NO: 71 - RNA, 19 nt, synthetic construct
  source 1..19: mol_type = other RNA
  modified_base 19: mod_base = OTHER; note = guanosine-3'-phosphate
ccgtgggatgcaggcaatg

SEQ ID NO: 72 - RNA, 19 nt, synthetic construct
  source 1..19: mol_type = other RNA
  modified_base 19: mod_base = OTHER; note = guanosine-3'-phosphate
cattgcctgcatcccacgg

SEQ ID NO: 73 - RNA, 19 nt, synthetic construct
  source 1..19: mol_type = other RNA
  modified_base 19: mod_base = OTHER; note = guanosine-3'-phosphate
ccatcttattatgccttgg

SEQ ID NO: 74 - RNA, 19 nt, synthetic construct
  source 1..19: mol_type = other RNA
  modified_base 19: mod_base = OTHER; note = guanosine-3'-phosphate
ccaaggcataataagatgg

SEQ ID NO: 75 - RNA, 19 nt, synthetic construct
  source 1..19: mol_type = other RNA
  modified_base 19: mod_base = OTHER; note = cytidine-3'-phosphate
tgaacgcatttactgtcac

SEQ ID NO: 76 - RNA, 19 nt, synthetic construct
  source 1..19: mol_type = other RNA
  modified_base 19: mod_base = OTHER; note = adenosine-3'-phosphate
gtgacagtaaatgcgttca

SEQ ID NO: 77 - RNA, 19 nt, synthetic construct
  source 1..19: mol_type = other RNA
  modified_base 19: mod_base = OTHER; note = adenosine-3'-phosphate
ggtgtagcactgacattca

SEQ ID NO: 78 - RNA, 19 nt, synthetic construct
  source 1..19: mol_type = other RNA
  modified_base 19: mod_base = OTHER; note = cytidine-3'-phosphate
tgaatgtcagtgctacacc

SEQ ID NO: 79 - RNA, 19 nt, synthetic construct
  source 1..19: mol_type = other RNA
  modified_base 19: mod_base = OTHER; note = adenosine-3'-phosphate
ctgaacgcatttactgtca

SEQ ID NO: 80 - RNA, 19 nt, synthetic construct
  source 1..19: mol_type = other RNA
  modified_base 19: mod_base = OTHER; note = guanosine-3'-phosphate
tgacagtaaatgcgttcag

SEQ ID NO: 81 - RNA, 19 nt, synthetic construct
  source 1..19: mol_type = other RNA
  modified_base 19: mod_base = OTHER; note = adenosine-3'-phosphate
caaggacctatatgtggta

SEQ ID NO: 82 - RNA, 19 nt, synthetic construct
  source 1..19: mol_type = other RNA
  modified_base 19: mod_base = OTHER; note = guanosine-3'-phosphate
taccacatataggtccttg

SEQ ID NO: 83 - RNA, 19 nt, synthetic construct
  source 1..19: mol_type = other RNA
  modified_base 19: mod_base = OTHER; note = adenosine-3'-phosphate
gagaccttgatactttcaa

SEQ ID NO: 84 - RNA, 19 nt, synthetic construct
  source 1..19: mol_type = other RNA
  modified_base 19: mod_base = OTHER; note = cytidine-3'-phosphate
ttgaaagtatcaaggtctc

SEQ ID NO: 85 - RNA, 19 nt, synthetic construct
  source 1..19: mol_type = other RNA
  modified_base 19: mod_base = OTHER; note = guanosine-3'-phosphate
gggctgagcgtgacaagag

SEQ ID NO: 86 - RNA, 19 nt, synthetic construct
  source 1..19: mol_type = other RNA
  modified_base 19: mod_base = OTHER; note = cytidine-3'-phosphate
ctcttgtcacgctcagccc

SEQ ID NO: 87 - RNA, 19 nt, synthetic construct
  source 1..19: mol_type = other RNA
  modified_base 19: mod_base = OTHER; note = adenosine-3'-phosphate
tatggtggtgccgactaca

SEQ ID NO: 88 - RNA, 19 nt, synthetic construct
  source 1..19: mol_type = other RNA
  modified_base 19: mod_base = OTHER; note = adenosine-3'-phosphate
tgtagtcggcaccaccata

SEQ ID NO: 89 - RNA, 19 nt, synthetic construct
  source 1..19: mol_type = other RNA
  modified_base 19: mod_base = OTHER; note = uridine-3'-phosphate
aaggttcagcatagtagct

SEQ ID NO: 90 - RNA, 19 nt, synthetic construct
  source 1..19: mol_type = other RNA
  modified_base 19: mod_base = OTHER; note = uridine-3'-phosphate
agctactatgctgaacctt

SEQ ID NO: 91 - RNA, 19 nt, synthetic construct
  source 1..19: mol_type = other RNA
  modified_base 19: mod_base = OTHER; note = guanosine-3'-phosphate
atcctaggaagacgggttg

SEQ ID NO: 92 - RNA, 19 nt, synthetic construct
  source 1..19: mol_type = other RNA
  modified_base 19: mod_base = OTHER; note = uridine-3'-phosphate
caacccgtcttcctaggat

SEQ ID NO: 93 - RNA, 19 nt, synthetic construct
  source 1..19: mol_type = other RNA
  modified_base 19: mod_base = OTHER; note = cytidine-3'-phosphate
atgttacaattttgtcgcc

SEQ ID NO: 94 - RNA, 19 nt, synthetic construct
  source 1..19: mol_type = other RNA
  modified_base 19: mod_base = OTHER; note = uridine-3'-phosphate
ggcgacaaaattgtaacat

SEQ ID NO: 95 - RNA, 19 nt, synthetic construct
  source 1..19: mol_type = other RNA
  modified_base 19: mod_base = OTHER; note = cytidine-3'-phosphate
atttactgtcacggttccc

SEQ ID NO: 96 - RNA, 19 nt, synthetic construct
  source 1..19: mol_type = other RNA
  modified_base 19: mod_base = OTHER; note = uridine-3'-phosphate
gggaaccgtgacagtaaat

SEQ ID NO: 97 - RNA, 19 nt, synthetic construct
  source 1..19: mol_type = other RNA
  modified_base 19: mod_base = OTHER; note = uridine-3'-phosphate
cgcatttactgtcacggtt

SEQ ID NO: 98 - RNA, 19 nt, synthetic construct
  source 1..19: mol_type = other RNA
  modified_base 19: mod_base = OTHER; note = guanosine-3'-phosphate
aaccgtgacagtaaatgcg

SEQ ID NO: 99 - RNA, 19 nt, synthetic construct
  source 1..19: mol_type = other RNA
  modified_base 19: mod_base = OTHER; note = adenosine-3'-phosphate
aggttcagcatagtagcta

SEQ ID NO: 100 - RNA, 19 nt, synthetic construct
  source 1..19: mol_type = other RNA
  modified_base 19: mod_base = OTHER; note = uridine-3'-phosphate
tagctactatgctgaacct

SEQ ID NO: 101 - RNA, 19 nt, synthetic construct
  source 1..19: mol_type = other RNA
  modified_base 19: mod_base = OTHER; note = cytidine-3'-phosphate
caccagccgcgcttctgtc

SEQ ID NO: 102 - RNA, 19 nt, synthetic construct
  source 1..19: mol_type = other RNA
  modified_base 19: mod_base = OTHER; note = guanosine-3'-phosphate
gacagaagcgcggctggtg

SEQ ID NO: 103 - RNA, 19 nt, synthetic construct
  source 1..19: mol_type = other RNA
  modified_base 19: mod_base = OTHER; note = cytidine-3'-phosphate
cgcgcttctgtccgcctgc

SEQ ID NO: 104 - RNA, 19 nt, synthetic construct
  source 1..19: mol_type = other RNA
  modified_base 19: mod_base = OTHER; note = guanosine-3'-phosphate
gcaggcggacagaagcgcg

SEQ ID NO: 105 - RNA, 19 nt, synthetic construct
  source 1..19: mol_type = other RNA
  modified_base 19: mod_base = OTHER; note = guanosine-3'-phosphate
aagatgaggatatttgctg

SEQ ID NO: 106 - RNA, 19 nt, synthetic construct
  source 1..19: mol_type = other RNA
  modified_base 19: mod_base = OTHER; note = uridine-3'-phosphate
cagcaaatatcctcatctt

SEQ ID NO: 107 - RNA, 19 nt, synthetic construct
  source 1..19: mol_type = other RNA
  modified_base 19: mod_base = OTHER; note = cytidine-3'-phosphate
ctttatattcatgacctac

SEQ ID NO: 108 - RNA, 19 nt, synthetic construct
  source 1..19: mol_type = other RNA
  modified_base 19: mod_base = OTHER; note = guanosine-3'-phosphate
gtaggtcatgaatataaag

SEQ ID NO: 109 - RNA, 19 nt, synthetic construct
  source 1..19: mol_type = other RNA
  modified_base 19: mod_base = OTHER; note = uridine-3'-phosphate
attcatgacctactggcat

SEQ ID NO: 110 - RNA, 19 nt, synthetic construct
  source 1..19: mol_type = other RNA
  modified_base 19: mod_base = OTHER; note = uridine-3'-phosphate
atgccagtaggtcatgaat

SEQ ID NO: 111 - RNA, 19 nt, synthetic construct
  source 1..19: mol_type = other RNA
  modified_base 19: mod_base = OTHER; note = uridine-3'-phosphate
tcatgacctactggcattt

SEQ ID NO: 112 - RNA, 19 nt, synthetic construct
  source 1..19: mol_type = other RNA
  modified_base 19: mod_base = OTHER; note = adenosine-3'-phosphate
aaatgccagtaggtcatga

SEQ ID NO: 113 - RNA, 19 nt, synthetic construct
  source 1..19: mol_type = other RNA
  modified_base 19: mod_base = OTHER; note = guanosine-3'-phosphate
tactggcatttgctgaacg

SEQ ID NO: 114 - RNA, 19 nt, synthetic construct
  source 1..19: mol_type = other RNA
  modified_base 19: mod_base = OTHER; note = adenosine-3'-phosphate
cgttcagcaaatgccagta

SEQ ID NO: 115 - RNA, 19 nt, synthetic construct
  source 1..19: mol_type = other RNA
  modified_base 19: mod_base = OTHER; note = adenosine-3'-phosphate
ctggcatttgctgaacgca

SEQ ID NO: 116 - RNA, 19 nt, synthetic construct
  source 1..19: mol_type = other RNA
  modified_base 19: mod_base = OTHER; note = guanosine-3'-phosphate
tgcgttcagcaaatgccag

SEQ ID NO: 117 - RNA, 19 nt, synthetic construct
  source 1..19: mol_type = other RNA
  modified_base 19: mod_base = OTHER; note = cytidine-3'-phosphate
atttgctgaacgcatttac

SEQ ID NO: 118 - RNA, 19 nt, synthetic construct
  source 1..19: mol_type = other RNA
  modified_base 19: mod_base = OTHER; note = uridine-3'-phosphate
gtaaatgcgttcagcaaat

SEQ ID NO: 119 - RNA, 19 nt, synthetic construct
  source 1..19: mol_type = other RNA
  modified_base 19: mod_base = OTHER; note = uridine-3'-phosphate
tttgctgaacgcatttact

SEQ ID NO: 120 - RNA, 19 nt, synthetic construct
  source 1..19: mol_type = other RNA
  modified_base 19: mod_base = OTHER; note = adenosine-3'-phosphate
agtaaatgcgttcagcaaa

SEQ ID NO: 121 - RNA, 19 nt, synthetic construct
  source 1..19: mol_type = other RNA
  modified_base 19: mod_base = OTHER; note = cytidine-3'-phosphate
gctgaacgcatttactgtc

SEQ ID NO: 122 - RNA, 19 nt, synthetic construct
  source 1..19: mol_type = other RNA
  modified_base 19: mod_base = OTHER; note = cytidine-3'-phosphate
gacagtaaatgcgttcagc

SEQ ID NO: 123 - RNA, 19 nt, synthetic construct
  source 1..19: mol_type = other RNA
  modified_base 19: mod_base = OTHER; note = adenosine-3'-phosphate
tttactgtcacggttccca

SEQ ID NO: 124 - RNA, 19 nt, synthetic construct
  source 1..19: mol_type = other RNA
  modified_base 19: mod_base = OTHER; note = adenosine-3'-phosphate
tgggaaccgtgacagtaaa

SEQ ID NO: 125 - RNA, 19 nt, synthetic construct
  source 1..19: mol_type = other RNA
  modified_base 19: mod_base = OTHER; note = uridine-3'-phosphate
acggttcccaaggacctat

SEQ ID NO: 126 - RNA, 19 nt, synthetic construct
  source 1..19: mol_type = other RNA
  modified_base 19: mod_base = OTHER; note = uridine-3'-phosphate
ataggtccttgggaaccgt

SEQ ID NO: 127 - RNA, 19 nt, synthetic construct
  source 1..19: mol_type = other RNA
  modified_base 19: mod_base = OTHER; note = adenosine-3'-phosphate
cggttcccaaggacctata

SEQ ID NO: 128 - RNA, 19 nt, synthetic construct
  source 1..19: mol_type = other RNA
  modified_base 19: mod_base = OTHER; note = guanosine-3'-phosphate
tataggtccttgggaaccg

SEQ ID NO: 129 - RNA, 19 nt, synthetic construct
  source 1..19: mol_type = other RNA
  modified_base 19: mod_base = OTHER; note = uridine-3'-phosphate
ggttcccaaggacctatat

SEQ ID NO: 130 - RNA, 19 nt, synthetic construct
  source 1..19: mol_type = other RNA
  modified_base 19: mod_base = OTHER; note = cytidine-3'-phosphate
atataggtccttgggaacc

SEQ ID NO: 131 - RNA, 19 nt, synthetic construct
  source 1..19: mol_type = other RNA
  modified_base 19: mod_base = OTHER; note = guanosine-3'-phosphate
gttcccaaggacctatatg

SEQ ID NO: 132 - RNA, 19 nt, synthetic construct
  source 1..19: mol_type = other RNA
  modified_base 19: mod_base = OTHER; note = cytidine-3'-phosphate
catataggtccttgggaac

SEQ ID NO: 133 - RNA, 19 nt, synthetic construct
  source 1..19: mol_type = other RNA
  modified_base 19: mod_base = OTHER; note = uridine-3'-phosphate
gacctatatgtggtagagt

SEQ ID NO: 134 - RNA, 19 nt, synthetic construct
  source 1..19: mol_type = other RNA
  modified_base 19: mod_base = OTHER; note = cytidine-3'-phosphate
actctaccacatataggtc

SEQ ID NO: 135 - RNA, 19 nt, synthetic construct
  source 1..19: mol_type = other RNA
  modified_base 19: mod_base = OTHER; note = adenosine-3'-phosphate
tggtagagtatggtagcaa

SEQ ID NO: 136 - RNA, 19 nt, synthetic construct
  source 1..19: mol_type = other RNA
  modified_base 19: mod_base = OTHER; note = adenosine-3'-phosphate
ttgctaccatactctacca

SEQ ID NO: 137 - RNA, 19 nt, synthetic construct
  source 1..19: mol_type = other RNA
  modified_base 19: mod_base = OTHER; note = adenosine-3'-phosphate
gtatggtagcaatatgaca

SEQ ID NO: 138 - RNA, 19 nt, synthetic construct
  source 1..19: mol_type = other RNA
  modified_base 19: mod_base = OTHER; note = cytidine-3'-phosphate
tgtcatattgctaccatac

SEQ ID NO: 139 - RNA, 19 nt, synthetic construct
  source 1..19: mol_type = other RNA
  modified_base 19: mod_base = OTHER; note = uridine-3'-phosphate
tggtagcaatatgacaatt

SEQ ID NO: 140 - RNA, 19 nt, synthetic construct
  source 1..19: mol_type = other RNA
  modified_base 19: mod_base = OTHER; note = adenosine-3'-phosphate
aattgtcatattgctacca

SEQ ID NO: 141 - RNA, 19 nt, synthetic construct
  source 1..19: mol_type = other RNA
  modified_base 19: mod_base = OTHER; note = guanosine-3'-phosphate
ggtagcaatatgacaattg

SEQ ID NO: 142 - RNA, 19 nt, synthetic construct
  source 1..19: mol_type = other RNA
  modified_base 19: mod_base = OTHER; note = cytidine-3'-phosphate
caattgtcatattgctacc

SEQ ID NO: 143 - RNA, 19 nt, synthetic construct
  source 1..19: mol_type = other RNA
  modified_base 19: mod_base = OTHER; note = uridine-3'-phosphate
agcaatatgacaattgaat

SEQ ID NO: 144 - RNA, 19 nt, synthetic construct
  source 1..19: mol_type = other RNA
  modified_base 19: mod_base = OTHER; note = uridine-3'-phosphate
attcaattgtcatattgct

SEQ ID NO: 145 - RNA, 19 nt, synthetic construct
  source 1..19: mol_type = other RNA
  modified_base 19: mod_base = OTHER; note = cytidine-3'-phosphate
caatatgacaattgaatgc

SEQ ID NO: 146 - RNA, 19 nt, synthetic construct
  source 1..19: mol_type = other RNA
  modified_base 19: mod_base = OTHER; note = guanosine-3'-phosphate
gcattcaattgtcatattg

SEQ ID NO: 147 - RNA, 19 nt, synthetic construct
  source 1..19: mol_type = other RNA
  modified_base 19: mod_base = OTHER; note = adenosine-3'-phosphate
aatatgacaattgaatgca

SEQ ID NO: 148 - RNA, 19 nt, synthetic construct
  source 1..19: mol_type = other RNA
  modified_base 19: mod_base = OTHER; note = uridine-3'-phosphate
tgcattcaattgtcatatt

SEQ ID NO: 149 - RNA, 19 nt, synthetic construct
  source 1..19: mol_type = other RNA
  modified_base 19: mod_base = OTHER; note = adenosine-3'-phosphate
atatgacaattgaatgcaa

SEQ ID NO: 150 - RNA, 19 nt, synthetic construct
  source 1..19: mol_type = other RNA
  modified_base 19: mod_base = OTHER; note = uridine-3'-phosphate
ttgcattcaattgtcatat

SEQ ID NO: 151 - RNA, 19 nt, synthetic construct
  source 1..19: mol_type = other RNA
  modified_base 19: mod_base = OTHER; note = cytidine-3'-phosphate
caattgaatgcaaattccc

SEQ ID NO: 152 - RNA, 19 nt, synthetic construct
  source 1..19: mol_type = other RNA
  modified_base 19: mod_base = OTHER; note = guanosine-3'-phosphate
gggaatttgcattcaattg

SEQ ID NO: 153 - RNA, 19 nt, synthetic construct
  source 1..19: mol_type = other RNA
  modified_base 19: mod_base = OTHER; note = adenosine-3'-phosphate
tgaatgcaaattcccagta

SEQ ID NO: 154 - RNA, 19 nt, synthetic construct
  source 1..19: mol_type = other RNA
  modified_base 19: mod_base = OTHER; note = adenosine-3'-phosphate
tactgggaatttgcattca

SEQ ID NO: 155 - RNA, 19 nt, synthetic construct
  source 1..19: mol_type = other RNA
  modified_base 19: mod_base = OTHER; note = adenosine-3'-phosphate
aatgcaaattcccagtaga

SEQ ID NO: 156 - RNA, 19 nt, synthetic construct
  source 1..19: mol_type = other RNA
  modified_base 19: mod_base = OTHER; note = uridine-3'-phosphate
tctactgggaatttgcatt

SEQ ID NO: 157 - RNA, 19 nt, synthetic construct
  source 1..19: mol_type = other RNA
  modified_base 19: mod_base = OTHER; note = uridine-3'-phosphate
aaaacaattagacctggct

SEQ ID NO: 158 - RNA, 19 nt, synthetic construct
  source 1..19: mol_type = other RNA
  modified_base 19: mod_base = OTHER; note = uridine-3'-phosphate
agccaggtctaattgtttt

SEQ ID NO: 159 - RNA, 19 nt, synthetic construct
  source 1..19: mol_type = other RNA
  modified_base 19: mod_base = OTHER; note = guanosine-3'-phosphate
aaacaattagacctggctg

SEQ ID NO: 160 - RNA, 19 nt, synthetic construct
  source 1..19: mol_type = other RNA
  modified_base 19: mod_base = OTHER; note = uridine-3'-phosphate
cagccaggtctaattgttt

SEQ ID NO: 161 - RNA, 19 nt, synthetic construct
  source 1..19: mol_type = other RNA
  modified_base 19: mod_base = OTHER; note = uridine-3'-phosphate
ggctgcactaattgtctat

SEQ ID NO: 162 - RNA, 19 nt, synthetic construct
  source 1..19: mol_type = other RNA
  modified_base 19: mod_base = OTHER; note = cytidine-3'-phosphate
atagacaattagtgcagcc

SEQ ID NO: 163 - RNA, 19 nt, synthetic construct
  source 1..19: mol_type = other RNA
  modified_base 19: mod_base = OTHER; note = guanosine-3'-phosphate
tgcactaattgtctattgg

SEQ ID NO: 164 - RNA, 19 nt, synthetic construct
  source 1..19: mol_type = other RNA
  modified_base 19: mod_base = OTHER; note = adenosine-3'-phosphate
ccaatagacaattagtgca

SEQ ID NO: 165 - RNA, 19 nt, synthetic construct
  source 1..19: mol_type = other RNA
  modified_base 19: mod_base = OTHER; note = adenosine-3'-phosphate
tattgggaaatggaggata

SEQ ID NO: 166 - RNA, 19 nt, synthetic construct
  source 1..19: mol_type = other RNA
  modified_base 19: mod_base = OTHER; note = adenosine-3'-phosphate
tatcctccatttcccaata

SEQ ID NO: 167 - RNA, 19 nt, synthetic construct
  source 1..19: mol_type = other RNA
  modified_base 19: mod_base = OTHER; note = guanosine-3'-phosphate
caatttgtgcatggagagg

SEQ ID NO: 168 - RNA, 19 nt, synthetic construct
  source 1..19: mol_type = other RNA
  modified_base 19: mod_base = OTHER; note = guanosine-3'-phosphate
cctctccatgcacaaattg

SEQ ID NO: 169 - RNA, 19 nt, synthetic construct
  source 1..19: mol_type = other RNA
  modified_base 19: mod_base = OTHER; note = uridine-3'-phosphate
cctgaaggttcagcatagt

SEQ ID NO: 170 - RNA, 19 nt, synthetic construct
  source 1..19: mol_type = other RNA
  modified_base 19: mod_base = OTHER; note = guanosine-3'-phosphate
actatgctgaaccttcagg

SEQ ID NO: 171 - RNA, 19 nt, synthetic construct
  source 1..19: mol_type = other RNA
  modified_base 19: mod_base = OTHER; note = guanosine-3'-phosphate
tgaaggttcagcatagtag

SEQ ID NO: 172 - RNA, 19 nt, synthetic construct
  source 1..19: mol_type = other RNA
  modified_base 19: mod_base = OTHER; note = adenosine-3'-phosphate
ctactatgctgaaccttca

SEQ ID NO: 173 - RNA, 19 nt, synthetic construct
  source 1..19: mol_type = other RNA
  modified_base 19: mod_base = OTHER; note = cytidine-3'-phosphate
ggttcagcatagtagctac

SEQ ID NO: 174 - RNA, 19 nt, synthetic construct
  source 1..19: mol_type = other RNA
  modified_base 19: mod_base = OTHER; note = cytidine-3'-phosphate
gtagctactatgctgaacc

SEQ ID NO: 175 - RNA, 19 nt, synthetic construct
  source 1..19: mol_type = other RNA
  modified_base 19: mod_base = OTHER; note = adenosine-3'-phosphate
gttcagcatagtagctaca

SEQ ID NO: 176 - RNA, 19 nt, synthetic construct
  source 1..19: mol_type = other RNA
  modified_base 19: mod_base = OTHER; note = cytidine-3'-phosphate
tgtagctactatgctgaac

SEQ ID NO: 177 - RNA, 19 nt, synthetic construct
  source 1..19: mol_type = other RNA
  modified_base 19: mod_base = OTHER; note = guanosine-3'-phosphate
ttcagcatagtagctacag

SEQ ID NO: 178 - RNA, 19 nt, synthetic construct
  source 1..19: mol_type = other RNA
  modified_base 19: mod_base = OTHER; note = adenosine-3'-phosphate
ctgtagctactatgctgaa

SEQ ID NO: 179 - RNA, 19 nt, synthetic construct
  source 1..19: mol_type = other RNA
  modified_base 19: mod_base = OTHER; note = adenosine-3'-phosphate
catagtagctacagacaga

SEQ ID NO: 180 - RNA, 19 nt, synthetic construct
  source 1..19: mol_type = other RNA
  modified_base 19: mod_base = OTHER; note = guanosine-3'-phosphate
tctgtctgtagctactatg

SEQ ID NO: 181 - RNA, 19 nt, synthetic construct
  source 1..19: mol_type = other RNA
  modified_base 19: mod_base = OTHER; note = guanosine-3'-phosphate
atagtagctacagacagag

SEQ ID NO: 182 - RNA, 19 nt, synthetic construct
  source 1..19: mol_type = other RNA
  modified_base 19: mod_base = OTHER; note = uridine-3'-phosphate
ctctgtctgtagctactat

SEQ ID NO: 183 - RNA, 19 nt, synthetic construct
  source 1..19: mol_type = other RNA
  modified_base 19: mod_base = OTHER; note = guanosine-3'-phosphate
ctacagacagagggcccgg

SEQ ID NO: 184 - RNA, 19 nt, synthetic construct
  source 1..19: mol_type = other RNA
  modified_base 19: mod_base = OTHER; note = guanosine-3'-phosphate
ccgggccctctgtctgtag

SEQ ID NO: 185 - RNA, 19 nt, synthetic construct
  source 1..19: mol_type = other RNA
  modified_base 19: mod_base = OTHER; note = guanosine-3'-phosphate
gctgcacttcagatcacag

SEQ ID NO: 186 - RNA, 19 nt, synthetic construct
  source 1..19: mol_type = other RNA
  modified_base 19: mod_base = OTHER; note = cytidine-3'-phosphate
ctgtgatctgaagtgcagc

SEQ ID NO: 187 - RNA, 19 nt, synthetic construct
  source 1..19: mol_type = other RNA
  modified_base 19: mod_base = OTHER; note = adenosine-3'-phosphate
ctgcacttcagatcacaga

SEQ ID NO: 188 - RNA, 19 nt, synthetic construct
  source 1..19: mol_type = other RNA
  modified_base 19: mod_base = OTHER; note = guanosine-3'-phosphate
tctgtgatctgaagtgcag

SEQ ID NO: 189 - RNA, 19 nt, synthetic construct
  source 1..19: mol_type = other RNA
  modified_base 19: mod_base = OTHER; note = uridine-3'-phosphate
tgcacttcagatcacagat

SEQ ID NO: 190 - RNA, 19 nt, synthetic construct
  source 1..19: mol_type = other RNA
  modified_base 19: mod_base = OTHER; note = adenosine-3'-phosphate
atctgtgatctgaagtgca

SEQ ID NO: 191 - RNA, 19 nt, synthetic construct
  source 1..19: mol_type = other RNA
  modified_base 19: mod_base = OTHER; note = guanosine-3'-phosphate
gcacttcagatcacagatg

SEQ ID NO: 192 - RNA, 19 nt, synthetic construct
  source 1..19: mol_type = other RNA
  modified_base 19: mod_base = OTHER; note = cytidine-3'-phosphate
catctgtgatctgaagtgc

SEQ ID NO: 193 - RNA, 19 nt, synthetic construct
  source 1..19: mol_type = other RNA
  modified_base 19: mod_base = OTHER; note = guanosine-3'-phosphate
aaattgcaggatgcagggg

SEQ ID NO: 194 - RNA, 19 nt, synthetic construct
  source 1..19: mol_type = other RNA
  modified_base 19: mod_base = OTHER; note = uridine-3'-phosphate
cccctgcatcctgcaattt

SEQ ID NO: 195 - RNA, 19 nt, synthetic construct
  source 1..19: mol_type = other RNA
  modified_base 19: mod_base = OTHER; note = cytidine-3'-phosphate
caggatgcaggggtgtacc

SEQ ID NO: 196 - RNA, 19 nt, synthetic construct
  source 1..19: mol_type = other RNA
  modified_base 19: mod_base = OTHER; note = guanosine-3'-phosphate
ggtacacccctgcatcctg

SEQ ID NO: 197 - RNA, 19 nt, synthetic construct
  source 1..19: mol_type = other RNA
  modified_base 19: mod_base = OTHER; note = cytidine-3'-phosphate
ggatgcaggggtgtaccgc

SEQ ID NO: 198 - RNA, 19 nt, synthetic construct
  source 1..19: mol_type = other RNA
  modified_base 19: mod_base = OTHER; note = cytidine-3'-phosphate
gcggtacacccctgcatcc

SEQ ID NO: 199 - RNA, 19 nt, synthetic construct
  source 1..19: mol_type = other RNA
  modified_base 19: mod_base = OTHER; note = cytidine-3'-phosphate
gtaccgctgcatgatcagc

SEQ ID NO: 200 - RNA, 19 nt, synthetic construct
  source 1..19: mol_type = other RNA
  modified_base 19: mod_base = OTHER; note = cytidine-3'-phosphate
gctgatcatgcagcggtac

SEQ ID NO: 201 - RNA, 19 nt, synthetic construct
  source 1..19: mol_type = other RNA
  modified_base 19: mod_base = OTHER; note = adenosine-3'-phosphate
accgctgcatgatcagcta

SEQ ID NO: 202 - RNA, 19 nt, synthetic construct
  source 1..19: mol_type = other RNA
  modified_base 19: mod_base = OTHER; note = uridine-3'-phosphate
tagctgatcatgcagcggt

SEQ ID NO: 203 - RNA, 19 nt, synthetic construct
  source 1..19: mol_type = other RNA
  modified_base 19: mod_base = OTHER; note = guanosine-3'-phosphate
atgatcagctatggtggtg

SEQ ID NO: 204 - RNA, 19 nt, synthetic construct
  source 1..19: mol_type = other RNA
  modified_base 19: mod_base = OTHER; note = uridine-3'-phosphate
caccaccatagctgatcat

SEQ ID NO: 205 - RNA, 19 nt, synthetic construct
  source 1..19: mol_type = other RNA
  modified_base 19: mod_base = OTHER; note = adenosine-3'-phosphate
gctatggtggtgccgacta

SEQ ID NO: 206 - RNA, 19 nt, synthetic construct
  source 1..19: mol_type = other RNA
  modified_base 19: mod_base = OTHER; note = cytidine-3'-phosphate
tagtcggcaccaccatagc

SEQ ID NO: 207 - RNA, 19 nt, synthetic construct
  source 1..19: mol_type = other RNA
  modified_base 19: mod_base = OTHER; note = uridine-3'-phosphate
tgccgactacaagcgaatt

SEQ ID NO: 208 - RNA, 19 nt, synthetic construct
  source 1..19: mol_type = other RNA
  modified_base 19: mod_base = OTHER; note = adenosine-3'-phosphate
aattcgcttgtagtcggca

SEQ ID NO: 209 - RNA, 19 nt, synthetic construct
  source 1..19: mol_type = other RNA
  modified_base 19: mod_base = OTHER; note = uridine-3'-phosphate
agcgaattactgtgaaagt

SEQ ID NO: 210 - RNA, 19 nt, synthetic construct
  source 1..19: mol_type = other RNA
  modified_base 19: mod_base = OTHER; note = uridine-3'-phosphate
actttcacagtaattcgct

SEQ ID NO: 211 - RNA, 19 nt, synthetic construct
  source 1..19: mol_type = other RNA
  modified_base 19: mod_base = OTHER; note = cytidine-3'-phosphate
gcgaattactgtgaaagtc

SEQ ID NO: 212 - RNA, 19 nt, synthetic construct
  source 1..19: mol_type = other RNA
  modified_base 19: mod_base = OTHER; note = cytidine-3'-phosphate
gactttcacagtaattcgc

SEQ ID NO: 213 - RNA, 19 nt, synthetic construct
  source 1..19: mol_type = other RNA
  modified_base 19: mod_base = OTHER; note = adenosine-3'-phosphate
cgaattactgtgaaagtca

SEQ ID NO: 214 - RNA, 19 nt, synthetic construct
  source 1..19: mol_type = other RNA
  modified_base 19: mod_base = OTHER; note = guanosine-3'-phosphate
tgactttcacagtaattcg

SEQ ID NO: 215 - RNA, 19 nt, synthetic construct
  source 1..19: mol_type = other RNA
  modified_base 19: mod_base = OTHER; note = guanosine-3'-phosphate
attactgtgaaagtcaatg

SEQ ID NO: 216 - RNA, 19 nt, synthetic construct
  source 1..19: mol_type = other RNA
  modified_base 19: mod_base = OTHER; note = uridine-3'-phosphate
cattgactttcacagtaat

SEQ ID NO: 217 - RNA, 19 nt, synthetic construct
  source 1..19: mol_type = other RNA
  modified_base 19: mod_base = OTHER; note = cytidine-3'-phosphate
tactgtgaaagtcaatgcc

SEQ ID NO: 218 - RNA, 19 nt, synthetic construct
  source 1..19: mol_type = other RNA
  modified_base 19: mod_base = OTHER; note = adenosine-3'-phosphate
ggcattgactttcacagta

SEQ ID NO: 219 - RNA, 19 nt, synthetic construct
  source 1..19: mol_type = other RNA
  modified_base 19: mod_base = OTHER; note = adenosine-3'-phosphate
aaagtcaatgccccataca

SEQ ID NO: 220 - RNA, 19 nt, synthetic construct
  source 1..19: mol_type = other RNA
  modified_base 19: mod_base = OTHER; note = uridine-3'-phosphate
tgtatggggcattgacttt

SEQ ID NO: 221 - RNA, 19 nt, synthetic construct
  source 1..19: mol_type = other RNA
  modified_base 19: mod_base = OTHER; note = adenosine-3'-phosphate
gtcaatgccccatacaaca

SEQ ID NO: 222 - RNA, 19 nt, synthetic construct
  source 1..19: mol_type = other RNA
  modified_base 19: mod_base = OTHER; note = cytidine-3'-phosphate
tgttgtatggggcattgac

SEQ ID NO: 223 - RNA, 19 nt, synthetic construct
  source 1..19: mol_type = other RNA
  modified_base 19: mod_base = OTHER; note = adenosine-3'-phosphate
aattttggttgtggatcca

SEQ ID NO: 224 - RNA, 19 nt, synthetic construct
  source 1..19: mol_type = other RNA
  modified_base 19: mod_base = OTHER; note = uridine-3'-phosphate
tggatccacaaccaaaatt

SEQ ID NO: 225 - RNA, 19 nt, synthetic construct
  source 1..19: mol_type = other RNA
  modified_base 19: mod_base = OTHER; note = guanosine-3'-phosphate
attttggttgtggatccag

SEQ ID NO: 226 - RNA, 19 nt, synthetic construct
  source 1..19: mol_type = other RNA
  modified_base 19: mod_base = OTHER; note = uridine-3'-phosphate
ctggatccacaaccaaaat

SEQ ID NO: 227 - RNA, 19 nt, synthetic construct
  source 1..19: mol_type = other RNA
  modified_base 19: mod_base = OTHER; note = adenosine-3'-phosphate
agtcacctctgaacatgaa

SEQ ID NO: 228 - RNA, 19 nt, synthetic construct
  source 1..19: mol_type = other RNA
  modified_base 19: mod_base = OTHER; note = uridine-3'-phosphate
ttcatgttcagaggtgact

SEQ ID NO: 229 - RNA, 19 nt, synthetic construct
  source 1..19: mol_type = other RNA
  modified_base 19: mod_base = OTHER; note = adenosine-3'-phosphate
acctctgaacatgaactga

SEQ ID NO: 230 - RNA, 19 nt, synthetic construct
  source 1..19: mol_type = other RNA
  modified_base 19: mod_base = OTHER; note = uridine-3'-phosphate
tcagttcatgttcagaggt

SEQ ID NO: 231 - RNA, 19 nt, synthetic construct
  source 1..19: mol_type = other RNA
  modified_base 19: mod_base = OTHER; note = cytidine-3'-phosphate
cctctgaacatgaactgac

SEQ ID NO: 232 - RNA, 19 nt, synthetic construct
  source 1..19: mol_type = other RNA
  modified_base 19: mod_base = OTHER; note = guanosine-3'-phosphate
gtcagttcatgttcagagg

SEQ ID NO: 233 - RNA, 19 nt, synthetic construct
  source 1..19: mol_type = other RNA
  modified_base 19: mod_base = OTHER; note = uridine-3'-phosphate
tgaacatgaactgacatgt

SEQ ID NO: 234 - RNA, 19 nt, synthetic construct
  source 1..19: mol_type = other RNA
  modified_base 19: mod_base = OTHER; note = adenosine-3'-phosphate
acatgtcagttcatgttca

SEQ ID NO: 235 - RNA, 19 nt, synthetic construct
  source 1..19: mol_type = other RNA
  modified_base 19: mod_base = OTHER; note = guanosine-3'-phosphate
acatgaactgacatgtcag

SEQ ID NO: 236 - RNA, 19 nt, synthetic construct
  source 1..19: mol_type = other RNA
  modified_base 19: mod_base = OTHER; note = uridine-3'-phosphate
ctgacatgtcagttcatgt

SEQ ID NO: 237 - RNA, 19 nt, synthetic construct
  source 1..19: mol_type = other RNA
  modified_base 19: mod_base = OTHER; note = guanosine-3'-phosphate
catgaactgacatgtcagg

SEQ ID NO: 238 - RNA, 19 nt, synthetic construct
  source 1..19: mol_type = other RNA
  modified_base 19: mod_base = OTHER; note = guanosine-3'-phosphate
cctgacatgtcagttcatg

SEQ ID NO: 239 - RNA, 19 nt, synthetic construct
  source 1..19: mol_type = other RNA
  modified_base 19: mod_base = OTHER; note = uridine-3'-phosphate
tgaactgacatgtcaggct

SEQ ID NO: 240 - RNA, 19 nt, synthetic construct
  source 1..19: mol_type = other RNA
  modified_base 19: mod_base = OTHER; note = adenosine-3'-phosphate
agcctgacatgtcagttca

SEQ ID NO: 241 - RNA, 19 nt, synthetic construct
  source 1..19: mol_type = other RNA
  modified_base 19: mod_base = OTHER; note = guanosine-3'-phosphate
gaactgacatgtcaggctg

SEQ ID NO: 242 - RNA, 19 nt, synthetic construct
  source 1..19: mol_type = other RNA
  modified_base 19: mod_base = OTHER; note = cytidine-3'-phosphate
cagcctgacatgtcagttc

SEQ ID NO: 243 - RNA, 19 nt, synthetic construct
  source 1..19: mol_type = other RNA
  modified_base 19: mod_base = OTHER; note = cytidine-3'-phosphate
gacatgtcaggctgagggc

SEQ ID NO: 244 - RNA, 19 nt, synthetic construct
  source 1..19: mol_type = other RNA
  modified_base 19: mod_base = OTHER; note = cytidine-3'-phosphate
gccctcagcctgacatgtc

SEQ ID NO: 245 - RNA, 19 nt, synthetic construct
  source 1..19: mol_type = other RNA
  modified_base 19: mod_base = OTHER; note = cytidine-3'-phosphate
tgtcaggctgagggctacc

SEQ ID NO: 246 - RNA, 19 nt, synthetic construct
  source 1..19: mol_type = other RNA
  modified_base 19: mod_base = OTHER; note = adenosine-3'-phosphate
ggtagccctcagcctgaca

SEQ ID NO: 247 - RNA, 19 nt, synthetic construct
  source 1..19: mol_type = other RNA
  modified_base 19: mod_base = OTHER; note = adenosine-3'-phosphate
taccccaaggccgaagtca

SEQ ID NO: 248 - RNA, 19 nt, synthetic construct
  source 1..19: mol_type = other RNA
  modified_base 19: mod_base = OTHER; note = adenosine-3'-phosphate
tgacttcggccttggggta

SEQ ID NO: 249 - RNA, 19 nt, synthetic construct
  source 1..19: mol_type = other RNA
  modified_base 19: mod_base = OTHER; note = adenosine-3'-phosphate
aaggccgaagtcatctgga

SEQ ID NO: 250 - RNA, 19 nt, synthetic construct
  source 1..19: mol_type = other RNA
  modified_base 19: mod_base = OTHER; note = uridine-3'-phosphate
tccagatgacttcggcctt

SEQ ID NO: 251 - RNA, 19 nt, synthetic construct
  source 1..19: mol_type = other RNA
  modified_base 19: mod_base = OTHER; note = cytidine-3'-phosphate
cgaagtcatctggacaagc

SEQ ID NO: 252 - RNA, 19 nt, synthetic construct
  source 1..19: mol_type = other RNA
  modified_base 19: mod_base = OTHER; note = guanosine-3'-phosphate
gcttgtccagatgacttcg

SEQ ID NO: 253 - RNA, 19 nt, synthetic construct
  source 1..19: mol_type = other RNA
  modified_base 19: mod_base = OTHER; note = cytidine-3'-phosphate
catctggacaagcagtgac

SEQ ID NO: 254 - RNA, 19 nt, synthetic construct
  source 1..19: mol_type = other RNA
  modified_base 19: mod_base = OTHER; note = guanosine-3'-phosphate
gtcactgcttgtccagatg

SEQ ID NO: 255 - RNA, 19 nt, synthetic construct
  source 1..19: mol_type = other RNA
  modified_base 19: mod_base = OTHER; note = cytidine-3'-phosphate
agcagtgaccatcaagtcc

SEQ ID NO: 256 - RNA, 19 nt, synthetic construct
  source 1..19: mol_type = other RNA
  modified_base 19: mod_base = OTHER; note = uridine-3'-phosphate
ggacttgatggtcactgct

SEQ ID NO: 257 - RNA, 19 nt, synthetic construct
  source 1..19: mol_type = other RNA
  modified_base 19: mod_base = OTHER; note = guanosine-3'-phosphate
tcaagtcctgagtggtaag

SEQ ID NO: 258 - RNA, 19 nt, synthetic construct
  source 1..19: mol_type = other RNA
  modified_base 19: mod_base = OTHER; note = adenosine-3'-phosphate
cttaccactcaggacttga

SEQ ID NO: 259 - RNA, 19 nt, synthetic construct
  source 1..19: mol_type = other RNA
  modified_base 19: mod_base = OTHER; note = adenosine-3'-phosphate
gaatcaacacaacaactaa

SEQ ID NO: 260 - RNA, 19 nt, synthetic construct
  source 1..19: mol_type = other RNA
  modified_base 19: mod_base = OTHER; note = cytidine-3'-phosphate
ttagttgttgtgttgattc

SEQ ID NO: 261 - RNA, 19 nt, synthetic construct
  source 1..19: mol_type = other RNA
  modified_base 19: mod_base = OTHER; note = uridine-3'-phosphate
aatcaacacaacaactaat

SEQ ID NO: 262 - RNA, 19 nt, synthetic construct
  source 1..19: mol_type = other RNA
  modified_base 19: mod_base = OTHER; note = uridine-3'-phosphate
attagttgttgtgttgatt

SEQ ID NO: 263 - RNA, 19 nt, synthetic construct
  source 1..19: mol_type = other RNA
  modified_base 19: mod_base = OTHER; note = adenosine-3'-phosphate
ttctactgcacttttagga

SEQ ID NO: 264 - RNA, 19 nt, synthetic construct
  source 1..19: mol_type = other RNA
  modified_base 19: mod_base = OTHER; note = adenosine-3'-phosphate
tcctaaaagtgcagtagaa

SEQ ID NO: 265 - RNA, 19 nt, synthetic construct
  source 1..19: mol_type = other RNA
  modified_base 19: mod_base = OTHER; note = adenosine-3'-phosphate
gcacttttaggagattaga

SEQ ID NO: 266 - RNA, 19 nt, synthetic construct
  source 1..19: mol_type = other RNA
  modified_base 19: mod_base = OTHER; note = cytidine-3'-phosphate
tctaatctcctaaaagtgc

SEQ ID NO: 267 - RNA, 19 nt, synthetic construct
  source 1..19: mol_type = other RNA
  modified_base 19: mod_base = OTHER; note = uridine-3'-phosphate
ttttaggagattagatcct

SEQ ID NO: 268 - RNA, 19 nt, synthetic construct
  source 1..19: mol_type = other RNA
  modified_base 19: mod_base = OTHER; note = adenosine-3'-phosphate
aggatctaatctcctaaaa

SEQ ID NO: 269 - RNA, 19 nt, synthetic construct
  source 1..19: mol_type = other RNA
  modified_base 19: mod_base = OTHER; note = adenosine-3'-phosphate
ttaggagattagatcctga

SEQ ID NO: 270 - RNA, 19 nt, synthetic construct
  source 1..19: mol_type = other RNA
  modified_base 19: mod_base = OTHER; note = adenosine-3'-phosphate
tcaggatctaatctcctaa

SEQ ID NO: 271 - RNA, 19 nt, synthetic construct
  source 1..19: mol_type = other RNA
  modified_base 19: mod_base = OTHER; note = guanosine-3'-phosphate
taggagattagatcctgag

SEQ ID NO: 272 - RNA, 19 nt, synthetic construct
  source 1..19: mol_type = other RNA
  modified_base 19: mod_base = OTHER; note = adenosine-3'-phosphate
ctcaggatctaatctccta

SEQ ID NO: 273 - RNA, 19 nt, synthetic construct
  source 1..19: mol_type = other RNA
  modified_base 19: mod_base = OTHER; note = guanosine-3'-phosphate
aggagattagatcctgagg

SEQ ID NO: 274 - RNA, 19 nt, synthetic construct
  source 1..19: mol_type = other RNA
  modified_base 19: mod_base = OTHER; note = uridine-3'-phosphate
cctcaggatctaatctcct

SEQ ID NO: 275 - RNA, 19 nt, synthetic construct
  source 1..19: mol_type = other RNA
  modified_base 19: mod_base = OTHER; note = adenosine-3'-phosphate
ggagattagatcctgagga

SEQ ID NO: 276 - RNA, 19 nt, synthetic construct
  source 1..19: mol_type = other RNA
  modified_base 19: mod_base = OTHER; note = cytidine-3'-phosphate
tcctcaggatctaatctcc

SEQ ID NO: 277 - RNA, 19 nt, synthetic construct
  source 1..19: mol_type = other RNA
  modified_base 19: mod_base = OTHER; note = guanosine-3'-phosphate
aaaccatacagctgaattg

SEQ ID NO: 278 - RNA, 19 nt, synthetic construct
  source 1..19: mol_type = other RNA
  modified_base 19: mod_base = OTHER; note = uridine-3'-phosphate
caattcagctgtatggttt

SEQ ID NO: 279 - RNA, 19 nt, synthetic construct
  source 1..19: mol_type = other RNA
  modified_base 19: mod_base = OTHER; note = guanosine-3'-phosphate
aaccatacagctgaattgg

SEQ ID NO: 280 - RNA, 19 nt, synthetic construct
  source 1..19: mol_type = other RNA
  modified_base 19: mod_base = OTHER; note = uridine-3'-phosphate
ccaattcagctgtatggtt

SEQ ID NO: 281 - RNA, 19 nt, synthetic construct
  source 1..19: mol_type = other RNA
  modified_base 19: mod_base = OTHER; note = cytidine-3'-phosphate
ccatacagctgaattggtc

SEQ ID NO: 282 - RNA, 19 nt, synthetic construct
  source 1..19: mol_type = other RNA
  modified_base 19: mod_base = OTHER; note = guanosine-3'-phosphate
gaccaattcagctgtatgg

SEQ ID NO: 283 - RNA, 19 nt, synthetic construct
  source 1..19: mol_type = other RNA
  modified_base 19: mod_base = OTHER; note = uridine-3'-phosphate
atacagctgaattggtcat

SEQ ID NO: 284 - RNA, 19 nt, synthetic construct
  source 1..19: mol_type = other RNA
  modified_base 19: mod_base = OTHER; note = uridine-3'-phosphate
atgaccaattcagctgtat

SEQ ID NO: 285 - RNA, 19 nt, synthetic construct
  source 1..19: mol_type = other RNA
  modified_base 19: mod_base = OTHER; note = guanosine-3'-phosphate
gctgaattggtcatcccag

SEQ ID NO: 286 - RNA, 19 nt, synthetic construct
  source 1..19: mol_type = other RNA
  modified_base 19: mod_base = OTHER; note = cytidine-3'-phosphate
ctgggatgaccaattcagc

SEQ ID NO: 287 - RNA, 19 nt, synthetic construct
  source 1..19: mol_type = other RNA
  modified_base 19: mod_base = OTHER; note = uridine-3'-phosphate
ggtcatcccagaactacct

SEQ ID NO: 288 - RNA, 19 nt, synthetic construct
  source 1..19: mol_type = other RNA
  modified_base 19: mod_base = OTHER; note = cytidine-3'-phosphate
aggtagttctgggatgacc

SEQ ID NO: 289 - RNA, 19 nt, synthetic construct
  source 1..19: mol_type = other RNA
  modified_base 19: mod_base = OTHER; note = adenosine-3'-phosphate
tggcacatcctccaaatga

SEQ ID NO: 290 - RNA, 19 nt, synthetic construct
  source 1..19: mol_type = other RNA
  modified_base 19: mod_base = OTHER; note = adenosine-3'-phosphate
tcatttggaggatgtgcca

SEQ ID NO: 291 - RNA, 19 nt, synthetic construct
  source 1..19: mol_type = other RNA
  modified_base 19: mod_base = OTHER; note = adenosine-3'-phosphate
tgaaaggactcacttggta

SEQ ID NO: 292 - RNA, 19 nt, synthetic construct
  source 1..19: mol_type = other RNA
  modified_base 19: mod_base = OTHER; note = adenosine-3'-phosphate
taccaagtgagtcctttca

SEQ ID NO: 293 - RNA, 19 nt, synthetic construct
  source 1..19: mol_type = other RNA
  modified_base 19: mod_base = OTHER; note = cytidine-3'-phosphate
aggactcacttggtaattc

SEQ ID NO: 294 - RNA, 19 nt, synthetic construct
  source 1..19: mol_type = other RNA
  modified_base 19: mod_base = OTHER; note = uridine-3'-phosphate
gaattaccaagtgagtcct

SEQ ID NO: 295 - RNA, 19 nt, synthetic construct
  source 1..19: mol_type = other RNA
  modified_base 19: mod_base = OTHER; note = guanosine-3'-phosphate
gactcacttggtaattctg

SEQ ID NO: 296 - RNA, 19 nt, synthetic construct
  source 1..19: mol_type = other RNA
  modified_base 19: mod_base = OTHER; note = cytidine-3'-phosphate
cagaattaccaagtgagtc

SEQ ID NO: 297 - RNA, 19 nt, synthetic construct
  source 1..19: mol_type = other RNA
  modified_base 19: mod_base = OTHER; note = adenosine-3'-phosphate
tcacttggtaattctggga

SEQ ID NO: 298 - RNA, 19 nt, synthetic construct
  source 1..19: mol_type = other RNA
  modified_base 19: mod_base = OTHER; note = adenosine-3'-phosphate
tcccagaattaccaagtga

SEQ ID NO: 299 - RNA, 19 nt, synthetic construct
  source 1..19: mol_type = other RNA
  modified_base 19: mod_base = OTHER; note = cytidine-3'-phosphate
ggtaattctgggagccatc

SEQ ID NO: 300 - RNA, 19 nt, synthetic construct
  source 1..19: mol_type = other RNA
  modified_base 19: mod_base = OTHER; note = cytidine-3'-phosphate
gatggctcccagaattacc

SEQ ID NO: 301 - RNA, 19 nt, synthetic construct
  source 1..19: mol_type = other RNA
  modified_base 19: mod_base = OTHER; note = uridine-3'-phosphate
gtaattctgggagccatct

SEQ ID NO: 302 - RNA, 19 nt, synthetic construct
  source 1..19: mol_type = other RNA
  modified_base 19: mod_base = OTHER; note = cytidine-3'-phosphate
agatggctcccagaattac

SEQ ID NO: 303 - RNA, 19 nt, synthetic construct
  source 1..19: mol_type = other RNA
  modified_base 19: mod_base = OTHER; note = adenosine-3'-phosphate
tctgggagccatcttatta

SEQ ID NO: 304 - RNA, 19 nt, synthetic construct
  source 1..19: mol_type = other RNA
  modified_base 19: mod_base = OTHER; note = adenosine-3'-phosphate
taataagatggctcccaga

SEQ ID NO: 305 - RNA, 19 nt, synthetic construct
  source 1..19: mol_type = other RNA
  modified_base 19: mod_base = OTHER; note = uridine-3'-phosphate
ctgggagccatcttattat

SEQ ID NO: 306 - RNA, 19 nt, synthetic construct
  source 1..19: mol_type = other RNA
  modified_base 19: mod_base = OTHER; note = guanosine-3'-phosphate
ataataagatggctcccag

SEQ ID NO: 307 - RNA, 19 nt, synthetic construct
  source 1..19: mol_type = other RNA
  modified_base 19: mod_base = OTHER; note = guanosine-3'-phosphate
tgggagccatcttattatg

SEQ ID NO: 308 - RNA, 19 nt, synthetic construct
  source 1..19: mol_type = other RNA
  modified_base 19: mod_base = OTHER; note = adenosine-3'-phosphate
cataataagatggctccca

SEQ ID NO: 309 - RNA, 19 nt, synthetic construct
  source 1..19: mol_type = other RNA
  modified_base 19: mod_base = OTHER; note = cytidine-3'-phosphate
gggagccatcttattatgc

SEQ ID NO: 310 - RNA, 19 nt, synthetic construct
  source 1..19: mol_type = other RNA
  modified_base 19: mod_base = OTHER; note = cytidine-3'-phosphate
gcataataagatggctccc

SEQ ID NO: 311 - RNA, 19 nt, synthetic construct
  source 1..19: mol_type = other RNA
  modified_base 19: mod_base = OTHER; note = uridine-3'-phosphate
agccatcttattatgcctt

SEQ ID NO: 312 - RNA, 19 nt, synthetic construct
  source 1..19: mol_type = other RNA
  modified_base 19: mod_base = OTHER; note = uridine-3'-phosphate
aaggcataataagatggct

SEQ ID NO: 313 - RNA, 19 nt, synthetic construct
  source 1..19: mol_type = other RNA
  modified_base 19: mod_base = OTHER; note = guanosine-3'-phosphate
atcttattatgccttggtg

SEQ ID NO: 314 - RNA, 19 nt, synthetic construct
  source 1..19: mol_type = other RNA
  modified_base 19: mod_base = OTHER; note = uridine-3'-phosphate
caccaaggcataataagat

SEQ ID NO: 315 - RNA, 19 nt, synthetic construct
  source 1..19: mol_type = other RNA
  modified_base 19: mod_base = OTHER; note = cytidine-3'-phosphate
tattatgccttggtgtagc

SEQ ID NO: 316 - RNA, 19 nt, synthetic construct
  source 1..19: mol_type = other RNA
  modified_base 19: mod_base = OTHER; note = adenosine-3'-phosphate
gctacaccaaggcataata

SEQ ID NO: 317 - RNA, 19 nt, synthetic construct
  source 1..19: mol_type = other RNA
  modified_base 19: mod_base = OTHER; note = adenosine-3'-phosphate
attatgccttggtgtagca

SEQ ID NO: 318 - RNA, 19 nt, synthetic construct
  source 1..19: mol_type = other RNA
  modified_base 19: mod_base = OTHER; note = uridine-3'-phosphate
tgctacaccaaggcataat

SEQ ID NO: 319 - RNA, 19 nt, synthetic construct
  source 1..19: mol_type = other RNA
  modified_base 19: mod_base = OTHER; note = adenosine-3'-phosphate
tgccttggtgtagcactga

SEQ ID NO: 320 - RNA, 19 nt, synthetic construct
  source 1..19: mol_type = other RNA
  modified_base 19: mod_base = OTHER; note = adenosine-3'-phosphate
tcagtgctacaccaaggca

SEQ ID NO: 321 - RNA, 19 nt, synthetic construct
  source 1..19: mol_type = other RNA
  modified_base 19: mod_base = OTHER; note = cytidine-3'-phosphate
tggtgtagcactgacattc

SEQ ID NO: 322 - RNA, 19 nt, synthetic construct
  source 1..19: mol_type = other RNA
  modified_base 19: mod_base = OTHER; note = adenosine-3'-phosphate
gaatgtcagtgctacacca

SEQ ID NO: 323 - RNA, 19 nt, synthetic construct
  source 1..19: mol_type = other RNA
  modified_base 19: mod_base = OTHER; note = uridine-3'-phosphate
gtagcactgacattcatct

SEQ ID NO: 324 - RNA, 19 nt, synthetic construct
  source 1..19: mol_type = other RNA
  modified_base 19: mod_base = OTHER; note = cytidine-3'-phosphate
agatgaatgtcagtgctac

SEQ ID NO: 325 - RNA, 19 nt, synthetic construct
  source 1..19: mol_type = other RNA
  modified_base 19: mod_base = OTHER; note = uridine-3'-phosphate
ctgacattcatcttccgtt

SEQ ID NO: 326 - RNA, 19 nt, synthetic construct
  source 1..19: mol_type = other RNA
  modified_base 19: mod_base = OTHER; note = guanosine-3'-phosphate
aacggaagatgaatgtcag

SEQ ID NO: 327 - RNA, 19 nt, synthetic construct
  source 1..19: mol_type = other RNA
  modified_base 19: mod_base = OTHER; note = guanosine-3'-phosphate
agggagaatgatggatgtg

SEQ ID NO: 328 - RNA, 19 nt, synthetic construct
  source 1..19: mol_type = other RNA
  modified_base 19: mod_base = OTHER; note = uridine-3'-phosphate
cacatccatcattctccct

SEQ ID NO: 329 - RNA, 19 nt, synthetic construct
  source 1..19: mol_type = other RNA
  modified_base 19: mod_base = OTHER; note = cytidine-3'-phosphate
tggcatccaagatacaaac

SEQ ID NO: 330 - RNA, 19 nt, synthetic construct
  source 1..19: mol_type = other RNA
  modified_base 19: mod_base = OTHER; note = adenosine-3'-phosphate
gtttgtatcttggatgcca

SEQ ID NO: 331 - RNA, 19 nt, synthetic construct
  source 1..19: mol_type = other RNA
  modified_base 19: mod_base = OTHER; note = uridine-3'-phosphate
ggcatccaagatacaaact

SEQ ID NO: 332 - RNA, 19 nt, synthetic construct
  source 1..19: mol_type = other RNA
  modified_base 19: mod_base = OTHER; note = cytidine-3'-phosphate
agtttgtatcttggatgcc

SEQ ID NO: 333 - RNA, 19 nt, synthetic construct
  source 1..19: mol_type = other RNA
  modified_base 19: mod_base = OTHER; note = cytidine-3'-phosphate
gcatccaagatacaaactc

SEQ ID NO: 334 - RNA, 19 nt, synthetic construct
  source 1..19: mol_type = other RNA
  modified_base 19: mod_base = OTHER; note = cytidine-3'-phosphate
gagtttgtatcttggatgc

SEQ ID NO: 335 - RNA, 19 nt, synthetic construct
  source 1..19: mol_type = other RNA
  modified_base 19: mod_base = OTHER; note = guanosine-3'-phosphate
caaagtgatacacatttgg

SEQ ID NO: 336 - RNA, 19 nt, synthetic construct
  source 1..19: mol_type = other RNA
  modified_base 19: mod_base = OTHER; note = guanosine-3'-phosphate
ccaaatgtgtatcactttg

SEQ ID NO: 337 - RNA, 19 nt, synthetic construct
  source 1..19: mol_type = other RNA
  modified_base 19: mod_base = OTHER; note = adenosine-3'-phosphate
gtgatacacatttggagga

SEQ ID NO: 338 - RNA, 19 nt, synthetic construct
  source 1..19: mol_type = other RNA
  modified_base 19: mod_base = OTHER; note = cytidine-3'-phosphate
tcctccaaatgtgtatcac

SEQ ID NO: 339 - RNA, 19 nt, synthetic construct
  source 1..19: mol_type = other RNA
  modified_base 19: mod_base = OTHER; note = uridine-3'-phosphate
acacatttggaggagacgt

SEQ ID NO: 340 - RNA, 19 nt, synthetic construct
  source 1..19: mol_type = other RNA
  modified_base 19: mod_base = OTHER; note = uridine-3'-phosphate
acgtctcctccaaatgtgt

SEQ ID NO: 341 - RNA, 19 nt, synthetic construct
  source 1..19: mol_type = other RNA
  modified_base 19: mod_base = OTHER; note = adenosine-3'-phosphate
acatttggaggagacgtaa

SEQ ID NO: 342 - RNA, 19 nt, synthetic construct
  source 1..19: mol_type = other RNA
  modified_base 19: mod_base = OTHER; note = uridine-3'-phosphate
ttacgtctcctccaaatgt

SEQ ID NO: 343 - RNA, 19 nt, synthetic construct
  source 1..19: mol_type = other RNA
  modified_base 19: mod_base = OTHER; note = uridine-3'-phosphate
catttggaggagacgtaat

SEQ ID NO: 344 - RNA, 19 nt, synthetic construct
  source 1..19: mol_type = other RNA
  modified_base 19: mod_base = OTHER; note = guanosine-3'-phosphate
attacgtctcctccaaatg

SEQ ID NO: 345 - RNA, 19 nt, synthetic construct
  source 1..19: mol_type = other RNA
  modified_base 19: mod_base = OTHER; note = cytidine-3'-phosphate
ggaggagacgtaatccagc

SEQ ID NO: 346 - RNA, 19 nt, synthetic construct
  source 1..19: mol_type = other RNA
  modified_base 19: mod_base = OTHER; note = cytidine-3'-phosphate
gctggattacgtctcctcc

SEQ ID NO: 347 - RNA, 19 nt, synthetic construct
  source 1..19: mol_type = other RNA
  modified_base 19: mod_base = OTHER; note = adenosine-3'-phosphate
acgtaatccagcattggaa

SEQ ID NO: 348 - RNA, 19 nt, synthetic construct
  source 1..19: mol_type = other RNA
  modified_base 19: mod_base = OTHER; note = uridine-3'-phosphate
ttccaatgctggattacgt

SEQ ID NO: 349 - RNA, 19 nt, synthetic construct
  source 1..19: mol_type = other RNA
  modified_base 19: mod_base = OTHER; note = uridine-3'-phosphate
aacctgtggtttaggggtt

SEQ ID NO: 350 - RNA, 19 nt, synthetic construct
  source 1..19: mol_type = other RNA
  modified_base 19: mod_base = OTHER; note = uridine-3'-phosphate
aacccctaaaccacaggtt

SEQ ID NO: 351 - RNA, 19 nt, synthetic construct
  source 1..19: mol_type = other RNA
  modified_base 19: mod_base = OTHER; note = adenosine-3'-phosphate
cctgtggtttaggggttca

SEQ ID NO: 352 - RNA, 19 nt, synthetic construct
  source 1..19: mol_type = other RNA
  modified_base 19: mod_base = OTHER; note = guanosine-3'-phosphate
tgaacccctaaaccacagg

SEQ ID NO: 353 - RNA, 19 nt, synthetic construct
  source 1..19: mol_type = other RNA
  modified_base 19: mod_base = OTHER; note = uridine-3'-phosphate
ctgtggtttaggggttcat

SEQ ID NO: 354 - RNA, 19 nt, synthetic construct
  source 1..19: mol_type = other RNA
  modified_base 19: mod_base = OTHER; note = guanosine-3'-phosphate
atgaacccctaaaccacag

SEQ ID NO: 355 - RNA, 19 nt, synthetic construct
  source 1..19: mol_type = other RNA
  modified_base 19: mod_base = OTHER; note = guanosine-3'-phosphate
tggtttaggggttcatcgg

SEQ ID NO: 356 - RNA, 19 nt, synthetic construct
  source 1..19: mol_type = other RNA
  modified_base 19: mod_base = OTHER; note = adenosine-3'-phosphate
ccgatgaacccctaaacca

SEQ ID NO: 357 - RNA, 19 nt, synthetic construct
  source 1..19: mol_type = other RNA
  modified_base 19: mod_base = OTHER; note = guanosine-3'-phosphate
ggtttaggggttcatcggg

SEQ ID NO: 358 - RNA, 19 nt, synthetic construct
  source 1..19: mol_type = other RNA
  modified_base 19: mod_base = OTHER; note = cytidine-3'-phosphate
cccgatgaacccctaaacc

SEQ ID NO: 359 - RNA, 19 nt, synthetic construct
  source 1..19: mol_type = other RNA
  modified_base 19: mod_base = OTHER; note = adenosine-3'-phosphate
aggcaatgtgggacttaaa

SEQ ID NO: 360 - RNA, 19 nt, synthetic construct
  source 1..19: mol_type = other RNA
  modified_base 19: mod_base = OTHER; note = uridine-3'-phosphate
tttaagtcccacattgcct

SEQ ID NO: 361 - RNA, 19 nt, synthetic construct
  source 1..19: mol_type = other RNA
  modified_base 19: mod_base = OTHER; note = adenosine-3'-phosphate
ggcaatgtgggacttaaaa

SEQ ID NO: 362 - RNA, 19 nt, synthetic construct
  source 1..19: mol_type = other RNA
  modified_base 19: mod_base = OTHER; note = cytidine-3'-phosphate
ttttaagtcccacattgcc

SEQ ID NO: 363 - RNA, 19 nt, synthetic construct
  source 1..19: mol_type = other RNA
  modified_base 19: mod_base = OTHER; note = guanosine-3'-phosphate
gcaatgtgggacttaaaag

SEQ ID NO: 364 - RNA, 19 nt, synthetic construct
  source 1..19: mol_type = other RNA
  modified_base 19: mod_base = OTHER; note = cytidine-3'-phosphate
cttttaagtcccacattgc

SEQ ID NO: 365 - RNA, 19 nt, synthetic construct
  source 1..19: mol_type = other RNA
  modified_base 19: mod_base = OTHER; note = adenosine-3'-phosphate
tgaaaatggaacctggcga

SEQ ID NO: 366 - RNA, 19 nt, synthetic construct
  source 1..19: mol_type = other RNA
  modified_base 19: mod_base = OTHER; note = adenosine-3'-phosphate
tcgccaggttccattttca

SEQ ID NO: 367 - RNA, 19 nt, synthetic construct
  source 1..19: mol_type = other RNA
  modified_base 19: mod_base = OTHER; note = adenosine-3'-phosphate
aaaatggaacctggcgaaa

SEQ ID NO: 368 - RNA, 19 nt, synthetic construct
  source 1..19: mol_type = other RNA
  modified_base 19: mod_base = OTHER; note = uridine-3'-phosphate
tttcgccaggttccatttt

SEQ ID NO: 369 - RNA, 19 nt, synthetic construct
  source 1..19: mol_type = other RNA
  modified_base 19: mod_base = OTHER; note = uridine-3'-phosphate
gagggagaccttgatactt

SEQ ID NO: 370 - RNA, 19 nt, synthetic construct
  source 1..19: mol_type = other RNA
  modified_base 19: mod_base = OTHER; note = cytidine-3'-phosphate
aagtatcaaggtctccctc

SEQ ID NO: 371 - RNA, 19 nt, synthetic construct
  source 1..19: mol_type = other RNA
  modified_base 19: mod_base = OTHER; note = uridine-3'-phosphate
agggagaccttgatacttt

SEQ ID NO: 372 - RNA, 19 nt, synthetic construct
  source 1..19: mol_type = other RNA
  modified_base 19: mod_base = OTHER; note = uridine-3'-phosphate
aaagtatcaaggtctccct

SEQ ID NO: 373 - RNA, 19 nt, synthetic construct
  source 1..19: mol_type = other RNA
  modified_base 19: mod_base = OTHER; note = adenosine-3'-phosphate
agaccttgatactttcaaa

SEQ ID NO: 374 - RNA, 19 nt, synthetic construct
  source 1..19: mol_type = other RNA
  modified_base 19: mod_base = OTHER; note = uridine-3'-phosphate
tttgaaagtatcaaggtct

SEQ ID NO: 375 - RNA, 19 nt, synthetic construct
  source 1..19: mol_type = other RNA
  modified_base 19: mod_base = OTHER; note = uridine-3'-phosphate
ttgatactttcaaatgcct

SEQ ID NO: 376 - RNA, 19 nt, synthetic construct
  source 1..19: mol_type = other RNA
  modified_base 19: mod_base = OTHER; note = adenosine-3'-phosphate
aggcatttgaaagtatcaa

SEQ ID NO: 377 - RNA, 19 nt, synthetic construct
  source 1..19: mol_type = other RNA
  modified_base 19: mod_base = OTHER; note = cytidine-3'-phosphate
aatgcctgaggggctcatc

SEQ ID NO: 378 - RNA, 19 nt, synthetic construct
  source 1..19: mol_type = other RNA
  modified_base 19: mod_base = OTHER; note = uridine-3'-phosphate
gatgagcccctcaggcatt

SEQ ID NO: 379 - RNA, 19 nt, synthetic construct
  source 1..19: mol_type = other RNA
  modified_base 19: mod_base = OTHER; note = adenosine-3'-phosphate
tgcctgaggggctcatcga

SEQ ID NO: 380 - RNA, 19 nt, synthetic construct
  source 1..19: mol_type = other RNA
  modified_base 19: mod_base = OTHER; note = adenosine-3'-phosphate
tcgatgagcccctcaggca

SEQ ID NO: 381 - RNA, 19 nt, synthetic construct
  source 1..19: mol_type = other RNA
  modified_base 19: mod_base = OTHER; note = guanosine-3'-phosphate
gggctcatcgacgcctgtg

SEQ ID NO: 382 - RNA, 19 nt, synthetic construct
  source 1..19: mol_type = other RNA
  modified_base 19: mod_base = OTHER; note = cytidine-3'-phosphate
cacaggcgtcgatgagccc

SEQ ID NO: 383 - RNA, 19 nt, synthetic construct
  source 1..19: mol_type = other RNA
  modified_base 19: mod_base = OTHER; note = adenosine-3'-phosphate
ggctcatcgacgcctgtga

SEQ ID NO: 384 - RNA, 19 nt, synthetic construct
  source 1..19: mol_type = other RNA
  modified_base 19: mod_base = OTHER; note = cytidine-3'-phosphate
tcacaggcgtcgatgagcc

SEQ ID NO: 385 - RNA, 19 nt, synthetic construct
  source 1..19: mol_type = other RNA
  modified_base 19: mod_base = OTHER; note = guanosine-3'-phosphate
atcgacgcctgtgacaggg

SEQ ID NO: 386 - RNA, 19 nt, synthetic construct
  source 1..19: mol_type = other RNA
  modified_base 19: mod_base = OTHER; note = uridine-3'-phosphate
ccctgtcacaggcgtcgat

SEQ ID NO: 387 - RNA, 19 nt, synthetic construct
  source 1..19: mol_type = other RNA
  modified_base 19: mod_base = OTHER; note = cytidine-3'-phosphate
aggagcctccaagcaaatc

SEQ ID NO: 388 - RNA, 19 nt, synthetic construct
  source 1..19: mol_type = other RNA
  modified_base 19: mod_base = OTHER; note = uridine-3'-phosphate
gatttgcttggaggctcct

SEQ ID NO: 389 - RNA, 19 nt, synthetic construct
  source 1..19: mol_type = other RNA
  modified_base 19: mod_base = OTHER; note = guanosine-3'-phosphate
atccattgctcatcctagg

SEQ ID NO: 390 - RNA, 19 nt, synthetic construct
  source 1..19: mol_type = other RNA
  modified_base 19: mod_base = OTHER; note = uridine-3'-phosphate
cctaggatgagcaatggat

SEQ ID NO: 391 - RNA, 19 nt, synthetic construct
  source 1..19: mol_type = other RNA
  modified_base 19: mod_base = OTHER; note = uridine-3'-phosphate
tcatcctaggaagacgggt

SEQ ID NO: 392 - RNA, 19 nt, synthetic construct
  source 1..19: mol_type = other RNA
  modified_base 19: mod_base = OTHER; note = adenosine-3'-phosphate
acccgtcttcctaggatga

SEQ ID NO: 393 - RNA, 19 nt, synthetic construct
  source 1..19: mol_type = other RNA
  modified_base 19: mod_base = OTHER; note = uridine-3'-phosphate
catcctaggaagacgggtt

SEQ ID NO: 394 - RNA, 19 nt, synthetic construct
  source 1..19: mol_type = other RNA
  modified_base 19: mod_base = OTHER; note = guanosine-3'-phosphate
aacccgtcttcctaggatg

SEQ ID NO: 395 - RNA, 19 nt, synthetic construct
  source 1..19: mol_type = other RNA
  modified_base 19: mod_base = OTHER; note = adenosine-3'-phosphate
ctaggaagacgggttgaga

SEQ ID NO: 396 - RNA, 19 nt, synthetic construct
  source 1..19: mol_type = other RNA
  modified_base 19: mod_base = OTHER; note = guanosine-3'-phosphate
tctcaacccgtcttcctag

SEQ ID NO: 397 - RNA, 19 nt, synthetic construct
  source 1..19: mol_type = other RNA
  modified_base 19: mod_base = OTHER; note = adenosine-3'-phosphate
acgggttgagaatccctaa

SEQ ID NO: 398 - RNA, 19 nt, synthetic construct
  source 1..19: mol_type = other RNA
  modified_base 19: mod_base = OTHER; note = uridine-3'-phosphate
ttagggattctcaacccgt

SEQ ID NO: 399 - RNA, 19 nt, synthetic construct
  source 1..19: mol_type = other RNA
  modified_base 19: mod_base = OTHER; note = guanosine-3'-phosphate
agaatccctaatttgaggg

SEQ ID NO: 400 - RNA, 19 nt, synthetic construct
  source 1..19: mol_type = other RNA
  modified_base 19: mod_base = OTHER; note = uridine-3'-phosphate
ccctcaaattagggattct

SEQ ID NO: 401 - RNA, 19 nt, synthetic construct
  source 1..19: mol_type = other RNA
  modified_base 19: mod_base = OTHER; note = cytidine-3'-phosphate
aatccctaatttgagggtc

SEQ ID NO: 402 - RNA, 19 nt, synthetic construct
  source 1..19: mol_type = other RNA
  modified_base 19: mod_base = OTHER; note = uridine-3'-phosphate
gaccctcaaattagggatt

SEQ ID NO: 403 - RNA, 19 nt, synthetic construct
  source 1..19: mol_type = other RNA
  modified_base 19: mod_base = OTHER; note = uridine-3'-phosphate
ccctaatttgagggtcagt

SEQ ID NO: 404 - RNA, 19 nt, synthetic construct
  source 1..19: mol_type = other RNA
  modified_base 19: mod_base = OTHER; note = guanosine-3'-phosphate
actgaccctcaaattaggg

SEQ ID NO: 405 - RNA, 19 nt, synthetic construct
  source 1..19: mol_type = other RNA
  modified_base 19: mod_base = OTHER; note = guanosine-3'-phosphate
cactcaatgcctcaatttg

SEQ ID NO: 406 - RNA, 19 nt, synthetic construct
  source 1..19: mol_type = other RNA
  modified_base 19: mod_base = OTHER; note = guanosine-3'-phosphate
caaattgaggcattgagtg

SEQ ID NO: 407 - RNA, 19 nt, synthetic construct
  source 1..19: mol_type = other RNA
  modified_base 19: mod_base = OTHER; note = uridine-3'-phosphate
actcaatgcctcaatttgt

SEQ ID NO: 408 - RNA, 19 nt, synthetic construct
  source 1..19: mol_type = other RNA
  modified_base 19: mod_base = OTHER; note = uridine-3'-phosphate
acaaattgaggcattgagt

SEQ ID NO: 409 - RNA, 19 nt, synthetic construct
  source 1..19: mol_type = other RNA
  modified_base 19: mod_base = OTHER; note = cytidine-3'-phosphate
ttctgcatgactgagagtc

SEQ ID NO: 410 - RNA, 19 nt, synthetic construct
  source 1..19: mol_type = other RNA
  modified_base 19: mod_base = OTHER; note = adenosine-3'-phosphate
gactctcagtcatgcagaa

SEQ ID NO: 411 - RNA, 19 nt, synthetic construct
  source 1..19: mol_type = other RNA
  modified_base 19: mod_base = OTHER; note = uridine-3'-phosphate
tctgcatgactgagagtct

SEQ ID NO: 412 - RNA, 19 nt, synthetic construct
  source 1..19: mol_type = other RNA
  modified_base 19: mod_base = OTHER; note = adenosine-3'-phosphate
agactctcagtcatgcaga

SEQ ID NO: 413 - RNA, 19 nt, synthetic construct
  source 1..19: mol_type = other RNA
  modified_base 19: mod_base = OTHER; note = guanosine-3'-phosphate
gcatgactgagagtctcag

SEQ ID NO: 414 - RNA, 19 nt, synthetic construct
  source 1..19: mol_type = other RNA
  modified_base 19: mod_base = OTHER; note = cytidine-3'-phosphate
ctgagactctcagtcatgc

SEQ ID NO: 415 - RNA, 19 nt, synthetic construct
  source 1..19: mol_type = other RNA
  modified_base 19: mod_base = OTHER; note = uridine-3'-phosphate
gactgagagtctcagtgtt

SEQ ID NO: 416 - RNA, 19 nt, synthetic construct
  source 1..19: mol_type = other RNA
  modified_base 19: mod_base = OTHER; note = cytidine-3'-phosphate
aacactgagactctcagtc

SEQ ID NO: 417 - RNA, 19 nt, synthetic construct
  source 1..19: mol_type = other RNA
  modified_base 19: mod_base = OTHER; note = guanosine-3'-phosphate
gagtctcagtgttggaacg

SEQ ID NO: 418 - RNA, 19 nt, synthetic construct
  source 1..19: mol_type = other RNA
  modified_base 19: mod_base = OTHER; note = cytidine-3'-phosphate
cgttccaacactgagactc

SEQ ID NO: 419 - RNA, 19 nt, synthetic construct
  source 1..19: mol_type = other RNA
  modified_base 19: mod_base = OTHER; note = cytidine-3'-phosphate
ctcagtgttggaacgggac

SEQ ID NO: 420 - RNA, 19 nt, synthetic construct
  source 1..19: mol_type = other RNA
  modified_base 19: mod_base = OTHER; note = guanosine-3'-phosphate
gtcccgttccaacactgag

SEQ ID NO: 421 - RNA, 19 nt, synthetic construct
  source 1..19: mol_type = other RNA
  modified_base 19: mod_base = OTHER; note = guanosine-3'-phosphate
ttattttgagtctgtgagg

SEQ ID NO: 422 - RNA, 19 nt, synthetic construct
  source 1..19: mol_type = other RNA
  modified_base 19: mod_base = OTHER; note = adenosine-3'-phosphate
cctcacagactcaaaataa

SEQ ID NO: 423 - RNA, 19 nt, synthetic construct
  source 1..19: mol_type = other RNA
  modified_base 19: mod_base = OTHER; note = cytidine-3'-phosphate
attttgagtctgtgaggtc

SEQ ID NO: 424 - RNA, 19 nt, synthetic construct
  source 1..19: mol_type = other RNA
  modified_base 19: mod_base = OTHER; note = uridine-3'-phosphate
gacctcacagactcaaaat

SEQ ID NO: 425 - RNA, 19 nt, synthetic construct
  source 1..19: mol_type = other RNA
  modified_base 19: mod_base = OTHER; note = uridine-3'-phosphate
atatattgtagtagatgtt

SEQ ID NO: 426 - RNA, 19 nt, synthetic construct
  source 1..19: mol_type = other RNA
  modified_base 19: mod_base = OTHER; note = uridine-3'-phosphate
aacatctactacaatatat

SEQ ID NO: 427 - RNA, 19 nt, synthetic construct
  source 1..19: mol_type = other RNA
  modified_base 19: mod_base = OTHER; note = uridine-3'-phosphate
actaaacttgctgcttaat

SEQ ID NO: 428 - RNA, 19 nt, synthetic construct
  source 1..19: mol_type = other RNA
  modified_base 19: mod_base = OTHER; note = uridine-3'-phosphate
attaagcagcaagtttagt

SEQ ID NO: 429 - RNA, 19 nt, synthetic construct
  source 1..19: mol_type = other RNA
  modified_base 19: mod_base = OTHER; note = cytidine-3'-phosphate
gctgcttaatgatttgctc

SEQ ID NO: 430 - RNA, 19 nt, synthetic construct
  source 1..19: mol_type = other RNA
  modified_base 19: mod_base = OTHER; note = cytidine-3'-phosphate
gagcaaatcattaagcagc

SEQ ID NO: 431 - RNA, 19 nt, synthetic construct
  source 1..19: mol_type = other RNA
  modified_base 19: mod_base = OTHER; note = cytidine-3'-phosphate
ttaatgatttgctcacatc

SEQ ID NO: 432 - RNA, 19 nt, synthetic construct
  source 1..19: mol_type = other RNA
  modified_base 19: mod_base = OTHER; note = adenosine-3'-phosphate
gatgtgagcaaatcattaa

SEQ ID NO: 433 - RNA, 19 nt, synthetic construct
  source 1..19: mol_type = other RNA
  modified_base 19: mod_base = OTHER; note = guanosine-3'-phosphate
cacatctagtaaaacatgg

SEQ ID NO: 434 - RNA, 19 nt, synthetic construct
  source 1..19: mol_type = other RNA
  modified_base 19: mod_base = OTHER; note = guanosine-3'-phosphate
ccatgttttactagatgtg

SEQ ID NO: 435 - RNA, 19 nt, synthetic construct
  source 1..19: mol_type = other RNA
  modified_base 19: mod_base = OTHER; note = uridine-3'-phosphate
ctagtaaaacatggagtat

SEQ ID NO: 436 - RNA, 19 nt, synthetic construct
  source 1..19: mol_type = other RNA
  modified_base 19: mod_base = OTHER; note = guanosine-3'-phosphate
atactccatgttttactag

SEQ ID NO: 437 - DNA, 21 bp, synthetic construct
  source 1..21: mol_type = other DNA
  modified_base 1: mod_base = OTHER; note = 2'-O-methylcytidine-3'-phosphate
  modified_base 2: mod_base = OTHER; note = guanosine-3'-phosphate
  modified_base 3: mod_base = OTHER; note = adenosine-3'-phosphate
  modified_base 4: mod_base = OTHER; note = 2'-O-methylcytidine-3'-phosphate
  modified_base 5: mod_base = OTHER; note = 2'-O-methyluridine-3'-phosphate
  modified_base 6: mod_base = OTHER; note = adenosine-3'-phosphate
  modified_base 7: mod_base = OTHER; note = 2'-O-methylcytidine-3'-phosphate
  modified_base 8: mod_base = OTHER; note = adenosine-3'-phosphate
  modified_base 9: mod_base = OTHER; note = adenosine-3'-phosphate
  modified_base 10: mod_base = OTHER; note = guanosine-3'-phosphate
  modified_base 11: mod_base = OTHER; note = 2'-O-methylcytidine-3'-phosphate
  modified_base 12: mod_base = OTHER; note = guanosine-3'-phosphate
  modified_base 13: mod_base = OTHER; note = adenosine-3'-phosphate
  modified_base 14: mod_base = OTHER; note = adenosine-3'-phosphate
  modified_base 15: mod_base = OTHER; note = 2'-O-methyluridine-3'-phosphate
  modified_base 16: mod_base = OTHER; note = 2'-O-methyluridine-3'-phosphate
  modified_base 17: mod_base = OTHER; note = adenosine-3'-phosphate
  modified_base 18: mod_base = OTHER; note = 2'-O-methylcytidine-3'-phosphate
  modified_base 19: mod_base = OTHER; note = 2'-O-methyluridine-3'-phosphate
  modified_base 20: mod_base = OTHER; note = 2'-deoxythymidine-3'-phosphorothioate
  misc_feature 1..19: note = RNA
  misc_feature 20..21: note = DNA
cgactacaagcgaattacttt

SEQ ID NO: 438 - DNA, 21 bp, synthetic construct
  source 1..21: mol_type = other DNA
  modified_base 1: mod_base = OTHER; note = adenosine-3'-phosphate
  modified_base 2: mod_base = OTHER; note = guanosine-3'-phosphate
  modified_base 3: mod_base = OTHER; note = 2'-O-methyluridine-3'-phosphate
  modified_base 4: mod_base = OTHER; note = adenosine-3'-phosphate
  modified_base 5: mod_base = OTHER; note = adenosine-3'-phosphate
  modified_base 6: mod_base = OTHER; note = uridine-3'-phosphate
  modified_base 7: mod_base = OTHER; note = uridine-3'-phosphate
  modified_base 8: mod_base = OTHER; note = cytidine-3'-phosphate
  modified_base 9: mod_base = OTHER; note = guanosine-3'-phosphate
  modified_base 10: mod_base = OTHER; note = cytidine-3'-phosphate
  modified_base 11: mod_base = OTHER; note = uridine-3'-phosphate
  modified_base 12: mod_base = OTHER; note = uridine-3'-phosphate
  modified_base 13: mod_base = OTHER; note = guanosine-3'-phosphate
  modified_base 14: mod_base = OTHER; note = 2'-O-methyluridine-3'-phosphate
  modified_base 15: mod_base = OTHER; note = adenosine-3'-phosphate
  modified_base 16: mod_base = OTHER; note = guanosine-3'-phosphate
  modified_base 17: mod_base = OTHER; note = uridine-3'-phosphate
  modified_base 18: mod_base = OTHER; note = cytidine-3'-phosphate
  modified_base 19: mod_base = OTHER; note = guanosine-3'-phosphate
  modified_base 20: mod_base = OTHER; note = 2'-deoxythymidine-3'-phosphorothioate
  misc_feature 1..19: note = RNA
  misc_feature 20..21: note = DNA
agtaattcgcttgtagtcgtt

SEQ ID NO: 439 - DNA, 21 bp, synthetic construct
  source 1..21: mol_type = other DNA
  modified_base 1: mod_base = OTHER; note = 2'-O-methyluridine-3'-phosphate
  modified_base 2: mod_base = OTHER; note = 2'-O-methylcytidine-3'-phosphate
  modified_base 3: mod_base = OTHER; note = 2'-O-methylcytidine-3'-phosphate
  modified_base 4: mod_base = OTHER; note = 2'-O-methyluridine-3'-phosphate
  modified_base 5: mod_base = OTHER; note = adenosine-3'-phosphate
  modified_base 6: mod_base = OTHER; note = guanosine-3'-phosphate
  modified_base 7: mod_base = OTHER; note = guanosine-3'-phosphate
  modified_base 8: mod_base = OTHER; note = adenosine-3'-phosphate
  modified_base 9: mod_base = OTHER; note = adenosine-3'-phosphate
  modified_base 10: mod_base = OTHER; note = guanosine-3'-phosphate
  modified_base 11: mod_base = OTHER; note = adenosine-3'-phosphate
  modified_base 12: mod_base = OTHER; note = 2'-O-methylcytidine-3'-phosphate
  modified_base 13: mod_base = OTHER; note = guanosine-3'-phosphate
  modified_base 14: mod_base = OTHER; note = guanosine-3'-phosphate
  modified_base 15: mod_base = OTHER; note = guanosine-3'-phosphate
  modified_base 16: mod_base = OTHER; note = 2'-O-methyluridine-3'-phosphate
  modified_base 17: mod_base = OTHER; note = 2'-O-methyluridine-3'-phosphate
  modified_base 18: mod_base = OTHER; note = guanosine-3'-phosphate
  modified_base 19: mod_base = OTHER; note = adenosine-3'-phosphate
  modified_base 20: mod_base = OTHER; note = 2'-deoxythymidine-3'-phosphorothioate
  misc_feature 1..19: note = RNA
  misc_feature 20..21: note = DNA
tcctaggaagacgggttgatt

SEQ ID NO: 440 - DNA, 21 bp, synthetic construct
  source 1..21: mol_type = other DNA
  modified_base 1: mod_base = OTHER; note = uridine-3'-phosphate
  modified_base 2: mod_base = OTHER; note = 2'-O-methylcytidine-3'-phosphate
  modified_base 3: mod_base = OTHER; note = adenosine-3'-phosphate
  modified_base 4: mod_base = OTHER; note = adenosine-3'-phosphate
  modified_base 5: mod_base = OTHER; note = cytidine-3'-phosphate
  modified_base 6: mod_base = OTHER; note = cytidine-3'-phosphate
  modified_base 7: mod_base = OTHER; note = cytidine-3'-phosphate
  modified_base 8: mod_base = OTHER; note = guanosine-3'-phosphate
  modified_base 9: mod_base = OTHER; note = uridine-3'-phosphate
  modified_base 10: mod_base = OTHER; note = cytidine-3'-phosphate
  modified_base 11: mod_base = OTHER; note = uridine-3'-phosphate
  modified_base 12: mod_base = OTHER; note = uridine-3'-phosphate
  modified_base 13: mod_base = OTHER; note = cytidine-3'-phosphate
  modified_base 14: mod_base = OTHER; note = cytidine-3'-phosphate
  modified_base 15: mod_base = OTHER; note = 2'-O-methyluridine-3'-phosphate
  modified_base 16: mod_base = OTHER; note = adenosine-3'-phosphate
  modified_base 17: mod_base = OTHER; note = guanosine-3'-phosphate
  modified_base 18: mod_base = OTHER; note = guanosine-3'-phosphate
  modified_base 19: mod_base = OTHER; note = adenosine-3'-phosphate
  modified_base 20: mod_base = OTHER; note = 2'-deoxythymidine-3'-phosphorothioate
  misc_feature 1..19: note = RNA
  misc_feature 20..21: note = DNA
tcaacccgtcttcctaggatt

SEQ ID NO: 441 - DNA, 21 bp, synthetic construct
  source 1..21: mol_type = other DNA
  modified_base 1: mod_base = OTHER; note = guanosine-3'-phosphate
  modified_base 2: mod_base = OTHER; note = 2'-O-methyluridine-3'-phosphate
  modified_base 3: mod_base = OTHER; note = guanosine-3'-phosphate
  modified_base 4: mod_base = OTHER; note = 2'-O-methylcytidine-3'-phosphate
  modified_base 5: mod_base = OTHER; note = 2'-O-methylcytidine-3'-phosphate
  modified_base 6: mod_base = OTHER; note = guanosine-3'-phosphate
  modified_base 7: mod_base = OTHER; note = adenosine-3'-phosphate
  modified_base 8: mod_base = OTHER; note = 2'-O-methylcytidine-3'-phosphate
  modified_base 9: mod_base = OTHER; note = 2'-O-methyluridine-3'-phosphate
  modified_base 10: mod_base = OTHER; note = adenosine-3'-phosphate
  modified_base 11: mod_base = OTHER; note = 2'-O-methylcytidine-3'-phosphate
  modified_base 12: mod_base = OTHER; note = adenosine-3'-phosphate
  modified_base 13: mod_base = OTHER; note = adenosine-3'-phosphate
  modified_base 14: mod_base = OTHER; note = guanosine-3'-phosphate
  modified_base 15: mod_base = OTHER; note = 2'-O-methylcytidine-3'-phosphate
  modified_base 16: mod_base = OTHER; note = guanosine-3'-phosphate
  modified_base 17: mod_base = OTHER; note = adenosine-3'-phosphate
  modified_base 18: mod_base = OTHER; note = adenosine-3'-phosphate
  modified_base 19: mod_base = OTHER; note = 2'-O-methyluridine-3'-phosphate
  modified_base 20: mod_base = OTHER; note = 2'-deoxythymidine-3'-phosphorothioate
  misc_feature 1..19: note = RNA
  misc_feature 20..21: note = DNA
gtgccgactacaagcgaattt

SEQ ID NO: 442 - DNA, 21 bp, synthetic construct
  source 1..21: mol_type = other DNA
  modified_base 1: mod_base = OTHER; note = adenosine-3'-phosphate
  modified_base 2: mod_base = OTHER; note = uridine-3'-phosphate
  modified_base 3: mod_base = OTHER; note = uridine-3'-phosphate
  modified_base 4: mod_base = OTHER; note = cytidine-3'-phosphate
  modified_base 5: mod_base = OTHER; note = guanosine-3'-phosphate
  modified_base 6: mod_base = OTHER; note = cytidine-3'-phosphate
  modified_base 7: mod_base = OTHER; note = uridine-3'-phosphate
  modified_base 8: mod_base = OTHER; note = uridine-3'-phosphate
  modified_base 9: mod_base = OTHER; note = guanosine-3'-phosphate
  modified_base 10: mod_base = OTHER; note = 2'-O-methyluridine-3'-phosphate
  modified_base 11: mod_base = OTHER; note = adenosine-3'-phosphate
  modified_base 12: mod_base = OTHER; note = guanosine-3'-phosphate
  modified_base 13: mod_base = OTHER; note = uridine-3'-phosphate
  modified_base 14: mod_base = OTHER; note = cytidine-3'-phosphate
  modified_base 15: mod_base = OTHER; note = guanosine-3'-phosphate
  modified_base 16: mod_base = OTHER; note = guanosine-3'-phosphate
  modified_base 17: mod_base = OTHER; note = 2'-O-methylcytidine-3'-phosphate
  modified_base 18: mod_base = OTHER; note = adenosine-3'-phosphate
  modified_base 19: mod_base = OTHER; note = cytidine-3'-phosphate
  modified_base 20: mod_base = OTHER; note = 2'-deoxythymidine-3'-phosphorothioate
  misc_feature 1..19: note = RNA
  misc_feature 20..21: note = DNA
attcgcttgtagtcggcactt

SEQ ID NO: 443 - DNA, 21 bp, synthetic construct
  source 1..21: mol_type = other DNA
  modified_base 1: mod_base = OTHER; note = 2'-O-methylcytidine-3'-phosphate
  modified_base 2: mod_base = OTHER; note = 2'-O-methylcytidine-3'-phosphate
  modified_base 3: mod_base = OTHER; note = guanosine-3'-phosphate
  modified_base 4: mod_base = OTHER; note = adenosine-3'-phosphate
  modified_base 5: mod_base = OTHER; note = 2'-O-methylcytidine-3'-phosphate
  modified_base 6: mod_base = OTHER; note = 2'-O-methyluridine-3'-phosphate
  modified_base 7: mod_base = OTHER; note = adenosine-3'-phosphate
  modified_base 8: mod_base = OTHER; note = 2'-O-methylcytidine-3'-phosphate
  modified_base 9: mod_base = OTHER; note = adenosine-3'-phosphate
  modified_base 10: mod_base = OTHER; note = adenosine-3'-phosphate
  modified_base 11: mod_base = OTHER; note = guanosine-3'-phosphate
  modified_base 12: mod_base = OTHER; note = 2'-O-methylcytidine-3'-phosphate
  modified_base 13: mod_base = OTHER; note = guanosine-3'-phosphate
  modified_base 14: mod_base = OTHER; note = adenosine-3'-phosphate
  modified_base 15: mod_base = OTHER; note = adenosine-3'-phosphate
  modified_base 16: mod_base = OTHER; note = 2'-O-methyluridine-3'-phosphate
  modified_base 17: mod_base = OTHER; note = 2'-O-methyluridine-3'-phosphate
  modified_base 18: mod_base = OTHER; note = adenosine-3'-phosphate
  modified_base 19: mod_base = OTHER; note = 2'-O-methylcytidine-3'-phosphate
  modified_base 20: mod_base = OTHER; note = 2'-deoxythymidine-3'-phosphorothioate
  misc_feature 1..19: note = RNA
  misc_feature 20..21: note = DNA
ccgactacaagcgaattactt

SEQ ID NO: 444 - DNA, 21 bp, synthetic construct
  source 1..21: mol_type = other DNA
  modified_base 1: mod_base = OTHER; note = guanosine-3'-phosphate
  modified_base 2: mod_base = OTHER; note = 2'-O-methyluridine-3'-phosphate
  modified_base 3: mod_base = OTHER; note = adenosine-3'-phosphate
  modified_base 4: mod_base = OTHER; note = adenosine-3'-phosphate
  modified_base 5: mod_base = OTHER; note = uridine-3'-phosphate
  modified_base 6: mod_base = OTHER; note = uridine-3'-phosphate
  modified_base 7: mod_base = OTHER; note = cytidine-3'-phosphate
  modified_base 8: mod_base = OTHER; note = guanosine-3'-phosphate
  modified_base 9: mod_base = OTHER; note = cytidine-3'-phosphate
  modified_base 10: mod_base = OTHER; note = uridine-3'-phosphate
  modified_base 11: mod_base = OTHER; note = uridine-3'-phosphate
  modified_base 12: mod_base = OTHER; note = guanosine-3'-phosphate
  modified_base 13: mod_base = OTHER; note = 2'-O-methyluridine-3'-phosphate
  modified_base 14: mod_base = OTHER; note = adenosine-3'-phosphate
  modified_base 15: mod_base = OTHER; note = guanosine-3'-phosphate
  modified_base 16: mod_base = OTHER; note = uridine-3'-phosphate
  modified_base 17: mod_base = OTHER; note = cytidine-3'-phosphate
  modified_base 18: mod_base = OTHER; note = guanosine-3'-phosphate
  modified_base 19: mod_base = OTHER; note = guanosine-3'-phosphate
  modified_base 20: mod_base = OTHER; note = 2'-deoxythymidine-3'-phosphorothioate
  misc_feature 1..19: note = RNA
  misc_feature 20..21: note = DNA
gtaattcgcttgtagtcggtt

SEQ ID NO: 445 - DNA, 21 bp, synthetic construct
  source 1..21: mol_type = other DNA
  modified_base 1: mod_base = OTHER; note = guanosine-3'-phosphate
  modified_base 2: mod_base = OTHER; note = 2'-O-methylcytidine-3'-phosphate
  modified_base 3: mod_base = OTHER; note = 2'-O-methylcytidine-3'-phosphate
  modified_base 4: mod_base = OTHER; note = guanosine-3'-phosphate
  modified_base 5: mod_base = OTHER; note = adenosine-3'-phosphate
  modified_base 6: mod_base = OTHER; note = 2'-O-methylcytidine-3'-phosphate
  modified_base 7: mod_base = OTHER; note = 2'-O-methyluridine-3'-phosphate
  modified_base 8: mod_base = OTHER; note = adenosine-3'-phosphate
  modified_base 9: mod_base = OTHER; note = 2'-O-methylcytidine-3'-phosphate
  modified_base 10: mod_base = OTHER; note = adenosine-3'-phosphate
  modified_base 11: mod_base = OTHER; note = adenosine-3'-phosphate
  modified_base 12: mod_base = OTHER; note = guanosine-3'-phosphate
  modified_base 13: mod_base = OTHER; note = 2'-O-methylcytidine-3'-phosphate
  modified_base 14: mod_base = OTHER; note = guanosine-3'-phosphate
  modified_base 15: mod_base = OTHER; note = adenosine-3'-phosphate
  modified_base 16: mod_base = OTHER; note = adenosine-3'-phosphate
  modified_base 17: mod_base = OTHER; note = 2'-O-methyluridine-3'-phosphate
  modified_base 18: mod_base = OTHER; note = 2'-O-methyluridine-3'-phosphate
  modified_base 19: mod_base = OTHER; note = adenosine-3'-phosphate
  modified_base 20: mod_base = OTHER; note = 2'-deoxythymidine-3'-phosphorothioate
  misc_feature 1..19: note = RNA
  misc_feature 20..21: note = DNA
gccgactacaagcgaattatt

SEQ ID NO: 446 - DNA, 21 bp, synthetic construct
  source 1..21: mol_type = other DNA
  modified_base 1: mod_base = OTHER; note = 2'-O-methyluridine-3'-phosphate
  modified_base 2: mod_base = OTHER; note = adenosine-3'-phosphate
  modified_base 3: mod_base = OTHER; note = adenosine-3'-phosphate
  modified_base 4: mod_base = OTHER; note = uridine-3'-phosphate
  modified_base 5: mod_base = OTHER; note = uridine-3'-phosphate
  modified_base 6: mod_base = OTHER; note = cytidine-3'-phosphate
  modified_base 7: mod_base = OTHER; note = guanosine-3'-phosphate
  modified_base 8: mod_base = OTHER; note = cytidine-3'-phosphate
  modified_base 9: mod_base = OTHER; note = uridine-3'-phosphate
  modified_base 10: mod_base = OTHER; note = uridine-3'-phosphate
  modified_base 11: mod_base = OTHER; note = guanosine-3'-phosphate
  modified_base 12: mod_base = OTHER; note = 2'-O-methyluridine-3'-phosphate
  modified_base 13: mod_base = OTHER; note = adenosine-3'-phosphate
  modified_base 14: mod_base = OTHER; note = guanosine-3'-phosphate
  modified_base 15: mod_base = OTHER; note = uridine-3'-phosphate
  modified_base 16: mod_base = OTHER; note = cytidine-3'-phosphate
  modified_base 17: mod_base = OTHER; note = guanosine-3'-phosphate
  modified_base 18: mod_base = OTHER; note = guanosine-3'-phosphate
  modified_base 19: mod_base = OTHER; note = cytidine-3'-phosphate
  modified_base 20: mod_base = OTHER; note = 2'-deoxythymidine-3'-phosphorothioate
  misc_feature 1..19: note = RNA
  misc_feature 20..21: note = DNA
taattcgcttgtagtcggctt

SEQ ID NO: 447 - DNA, 21 bp, synthetic construct
  source 1..21: mol_type = other DNA
  modified_base 1: mod_base = OTHER; note = guanosine-3'-phosphate
  modified_base 2: mod_base = OTHER; note = 2'-O-methyluridine-3'-phosphate
  modified_base 3: mod_base = OTHER; note = 2'-O-methyluridine-3'-phosphate
  modified_base 4: mod_base = OTHER; note = 2'-O-methyluridine-3'-phosphate
  modified_base 5: mod_base = OTHER; note = adenosine-3'-phosphate
  modified_base 6: mod_base = OTHER; note = guanosine-3'-phosphate
  modified_base 7: mod_base = OTHER; note = guanosine-3'-phosphate
  modified_base 8: mod_base = OTHER; note = guanosine-3'-phosphate
  modified_base 9: mod_base = OTHER; note = guanosine-3'-phosphate
  modified_base 10: mod_base = OTHER; note = 2'-O-methyluridine-3'-phosphate
  modified_base 11: mod_base = OTHER; note = 2'-O-methyluridine-3'-phosphate
  modified_base 12: mod_base = OTHER; note = 2'-O-methylcytidine-3'-phosphate
  modified_base 13: mod_base = OTHER; note = adenosine-3'-phosphate
  modified_base 14: mod_base = OTHER; note = 2'-O-methyluridine-3'-phosphate
  modified_base 15: mod_base = OTHER; note = 2'-O-methylcytidine-3'-phosphate
  modified_base 16: mod_base = OTHER; note = guanosine-3'-phosphate
  modified_base 17: mod_base = OTHER; note = guanosine-3'-phosphate
  modified_base 18: mod_base = OTHER; note = guanosine-3'-phosphate
  modified_base 19: mod_base = OTHER; note = guanosine-3'-phosphate
  modified_base 20: mod_base = OTHER; note = 2'-deoxythymidine-3'-phosphorothioate
  misc_feature 1..19: note = RNA
  misc_feature 20..21: note = DNA
gtttaggggttcatcggggtt

SEQ ID NO: 448 - DNA, 21 bp, synthetic construct
  source 1..21: mol_type = other DNA
  modified_base 1: mod_base = OTHER; note = cytidine-3'-phosphate
  modified_base 2: mod_base = OTHER; note = cytidine-3'-phosphate
  modified_base 3: mod_base = OTHER; note = cytidine-3'-phosphate
  modified_base 4: mod_base = OTHER; note = cytidine-3'-phosphate
  modified_base 5: mod_base = OTHER; note = guanosine-3'-phosphate
  modified_base 6: mod_base = OTHER; note = adenosine-3'-phosphate
  modified_base 7: mod_base = OTHER; note = uridine-3'-phosphate
  modified_base 8: mod_base = OTHER; note = guanosine-3'-phosphate
  modified_base 9: mod_base = OTHER; note = adenosine-3'-phosphate
  modified_base 10: mod_base = OTHER; note = adenosine-3'-phosphate
  modified_base 11: mod_base = OTHER; note = cytidine-3'-phosphate
  modified_base 12: mod_base = OTHER; note = cytidine-3'-phosphate
  modified_base 13: mod_base = OTHER; note = cytidine-3'-phosphate
  modified_base 14: mod_base = OTHER; note = cytidine-3'-phosphate
  modified_base 15: mod_base = OTHER; note = 2'-O-methyluridine-3'-phosphate
  modified_base 16: mod_base = OTHER; note = adenosine-3'-phosphate
  modified_base 17: mod_base = OTHER; note = adenosine-3'-phosphate
  modified_base 18: mod_base = OTHER; note = adenosine-3'-phosphate
  modified_base 19: mod_base = OTHER; note = cytidine-3'-phosphate
  modified_base 20: mod_base = OTHER; note = 2'-deoxythymidine-3'-phosphorothioate
  misc_feature 1..19: note = RNA
  misc_feature 20..21: note = DNA
ccccgatgaacccctaaactt

SEQ ID NO: 449 - DNA, 21 bp, synthetic construct
  source 1..21: mol_type = other DNA
  modified_base 1: mod_base = OTHER; note = guanosine-3'-phosphate
  modified_base 2: mod_base = OTHER; note = adenosine-3'-phosphate
  modified_base 3: mod_base = OTHER; note = 2'-O-methyluridine-3'-phosphate
  modified_base 4: mod_base = OTHER; note = guanosine-3'-phosphate
  modified_base 5: mod_base = OTHER; note = 2'-O-methyluridine-3'-phosphate
  modified_base 6: mod_base = OTHER; note = 2'-O-methyluridine-3'-phosphate
  modified_base 7: mod_base = OTHER; note = adenosine-3'-phosphate
  modified_base 8: mod_base = OTHER; note = 2'-O-methylcytidine-3'-phosphate
  modified_base 9: mod_base = OTHER; note = adenosine-3'-phosphate
  modified_base 10: mod_base = OTHER; note = adenosine-3'-phosphate
  modified_base 11: mod_base = OTHER; note = 2'-O-methyluridine-3'-phosphate
  modified_base 12: mod_base = OTHER; note = 2'-O-methyluridine-3'-phosphate
  modified_base 13: mod_base = OTHER; note = 2'-O-methyluridine-3'-phosphate
  modified_base 14: mod_base = OTHER; note = 2'-O-methyluridine-3'-phosphate
  modified_base 15: mod_base = OTHER; note = guanosine-3'-phosphate
  modified_base 16: mod_base = OTHER; note = 2'-O-methyluridine-3'-phosphate
  modified_base 17: mod_base = OTHER; note = 2'-O-methylcytidine-3'-phosphate
  modified_base 18: mod_base = OTHER; note = guanosine-3'-phosphate
  modified_base 19: mod_base = OTHER; note = 2'-O-methylcytidine-3'-phosphate
  modified_base 20: mod_base = OTHER; note = 2'-deoxythymidine-3'-phosphorothioate
  misc_feature 1..19: note = RNA
  misc_feature 20..21: note = DNA
gatgttacaattttgtcgctt

SEQ ID NO: 450 - DNA, 21 bp, synthetic construct
  source 1..21: mol_type = other DNA
  modified_base 1: mod_base = OTHER; note = guanosine-3'-phosphate
  modified_base 2: mod_base = OTHER; note = cytidine-3'-phosphate
  modified_base 3: mod_base = OTHER; note = guanosine-3'-phosphate
  modified_base 4: mod_base = OTHER; note = adenosine-3'-phosphate
  modified_base 5: mod_base = OTHER; note = 2'-O-methylcytidine-3'-phosphate
  modified_base 6: mod_base = OTHER; note = adenosine-3'-phosphate
  modified_base 7: mod_base = OTHER; note = adenosine-3'-phosphate
  modified_base 8: mod_base = OTHER; note = adenosine-3'-phosphate
  modified_base 9: mod_base = OTHER; note = adenosine-3'-phosphate
  modified_base 10: mod_base = OTHER; note = uridine-3'-phosphate
  modified_base 11: mod_base = OTHER; note = uridine-3'-phosphate
  modified_base 12: mod_base = OTHER; note = guanosine-3'-phosphate
  modified_base 13: mod_base = OTHER; note = 2'-O-methyluridine-3'-phosphate
  modified_base 14: mod_base = OTHER; note = adenosine-3'-phosphate
  modified_base 15: mod_base = OTHER; note = adenosine-3'-phosphate
  modified_base 16: mod_base = OTHER; note = 2'-O-methylcytidine-3'-phosphate
  modified_base 17: mod_base = OTHER; note = adenosine-3'-phosphate
  modified_base 18: mod_base = OTHER; note = uridine-3'-phosphate
  modified_base 19: mod_base = OTHER; note = cytidine-3'-phosphate
  modified_base 20: mod_base = OTHER; note = 2'-deoxythymidine-3'-phosphorothioate
  misc_feature 1..19: note = RNA
  misc_feature 20..21: note = DNA
gcgacaaaattgtaacatctt

SEQ ID NO: 451 - DNA, 21 bp, synthetic construct
  source 1..21: mol_type = other DNA
  modified_base 1: mod_base = OTHER; note = guanosine-3'-phosphate
  modified_base 2: mod_base = OTHER; note = 2'-O-methylcytidine-3'-phosphate
  modified_base 3: mod_base = OTHER; note = adenosine-3'-phosphate
  modified_base 4: mod_base = OTHER; note = 2'-O-methyluridine-3'-phosphate
  modified_base 5: mod_base = OTHER; note = 2'-O-methyluridine-3'-phosphate
  modified_base 6: mod_base = OTHER; note = 2'-O-methyluridine-3'-phosphate
  modified_base 7: mod_base = OTHER; note = adenosine-3'-phosphate
  modified_base 8: mod_base = OTHER; note = 2'-O-methylcytidine-3'-phosphate
  modified_base 9: mod_base = OTHER; note = 2'-O-methyluridine-3'-phosphate
  modified_base 10: mod_base = OTHER; note = guanosine-3'-phosphate
  modified_base 11: mod_base = OTHER; note = 2'-O-methyluridine-3'-phosphate
  modified_base 12: mod_base = OTHER; note = 2'-O-methylcytidine-3'-phosphate
  modified_base 13: mod_base = OTHER; note = adenosine-3'-phosphate
  modified_base 14: mod_base = OTHER; note = 2'-O-methylcytidine-3'-phosphate
  modified_base 15: mod_base = OTHER; note = guanosine-3'-phosphate
  modified_base 16: mod_base = OTHER; note = guanosine-3'-phosphate
  modified_base 17: mod_base = OTHER; note = 2'-O-methyluridine-3'-phosphate
  modified_base 18: mod_base = OTHER; note = 2'-O-methyluridine-3'-phosphate
  modified_base 19: mod_base = OTHER; note = 2'-O-methylcytidine-3'-phosphate
  modified_base 20: mod_base = OTHER; note = 2'-deoxythymidine-3'-phosphorothioate
  misc_feature 1..19: note = RNA
  misc_feature 20..21: note = DNA
gcatttactgtcacggttctt

SEQ ID NO: 452 - DNA, 21 bp, synthetic construct
  source 1..21: mol_type = other DNA
  modified_base 1: mod_base = OTHER; note = guanosine-3'-phosphate
  modified_base 2: mod_base = OTHER; note = adenosine-3'-phosphate
  modified_base 3: mod_base = OTHER; note = adenosine-3'-phosphate
  modified_base 4: mod_base = OTHER; note = cytidine-3'-phosphate
  modified_base 5: mod_base = OTHER; note = cytidine-3'-phosphate
  modified_base 6: mod_base = OTHER; note = guanosine-3'-phosphate
  modified_base 7: mod_base = OTHER; note = uridine-3'-phosphate
  modified_base 8: mod_base = OTHER; note = guanosine-3'-phosphate
  modified_base 9: mod_base = OTHER; note = adenosine-3'-phosphate
  modified_base 10: mod_base = OTHER; note = 2'-O-methylcytidine-3'-phosphate
  modified_base 11: mod_base = OTHER; note = adenosine-3'-phosphate
  modified_base 12: mod_base = OTHER; note = guanosine-3'-phosphate
  modified_base 13: mod_base = OTHER; note = 2'-O-methyluridine-3'-phosphate
  modified_base 14: mod_base = OTHER; note = adenosine-3'-phosphate
  modified_base 15: mod_base = OTHER; note = adenosine-3'-phosphate
  modified_base 16: mod_base = OTHER; note = adenosine-3'-phosphate
  modified_base 17: mod_base = OTHER; note = uridine-3'-phosphate
  modified_base 18: mod_base = OTHER; note = guanosine-3'-phosphate
  modified_base 19: mod_base = OTHER; note = cytidine-3'-phosphate
  modified_base 20: mod_base = OTHER; note = 2'-deoxythymidine-3'-phosphorothioate
  misc_feature 1..19: note = RNA
  misc_feature 20..21: note = DNA
gaaccgtgacagtaaatgctt

SEQ ID NO: 453 - DNA, 21 bp, synthetic construct
  source 1..21: mol_type = other DNA
  modified_base 1: mod_base = OTHER; note = guanosine-3'-phosphate
  modified_base 2: mod_base = OTHER; note = adenosine-3'-phosphate
  modified_base 3: mod_base = OTHER; note = guanosine-3'-phosphate
  modified_base 4: mod_base = OTHER; note = 2'-O-methylcytidine-3'-phosphate
  modified_base 5: mod_base = OTHER; note = 2'-O-methylcytidine-3'-phosphate
  modified_base 6: mod_base = OTHER; note = adenosine-3'-phosphate
  modified_base 7: mod_base = OTHER; note = 2'-O-methyluridine-3'-phosphate
  modified_base 8: mod_base = OTHER; note = 2'-O-methylcytidine-3'-phosphate
  modified_base 9: mod_base = OTHER; note = 2'-O-methyluridine-3'-phosphate
  modified_base 10: mod_base = OTHER; note = 2'-O-methyluridine-3'-phosphate
  modified_base 11: mod_base = OTHER; note = adenosine-3'-phosphate
  modified_base 12: mod_base = OTHER; note = 2'-O-methyluridine-3'-phosphate
  modified_base 13: mod_base = OTHER; note = 2'-O-methyluridine-3'-phosphate
  modified_base 14: mod_base = OTHER; note = adenosine-3'-phosphate
  modified_base 15: mod_base = OTHER; note = 2'-O-methyluridine-3'-phosphate
  modified_base 16: mod_base = OTHER; note = guanosine-3'-phosphate
  modified_base 17: mod_base = OTHER; note = 2'-O-methylcytidine-3'-phosphate
  modified_base 18: mod_base = OTHER; note = 2'-O-methylcytidine-3'-phosphate
  modified_base 19: mod_base = OTHER; note = 2'-O-methyluridine-3'-phosphate
  modified_base 20: mod_base = OTHER; note = 2'-deoxythymidine-3'-phosphorothioate
  misc_feature 1..19: note = RNA
  misc_feature 20..21: note = DNA
gagccatcttattatgccttt

SEQ ID NO: 454 - DNA, 21 bp, synthetic construct
  source 1..21: mol_type = other DNA
  modified_base 1: mod_base = OTHER; note = adenosine-3'-phosphate
  modified_base 2: mod_base = OTHER; note = guanosine-3'-phosphate
  modified_base 3: mod_base = OTHER; note = guanosine-3'-phosphate
  modified_base 4: mod_base = OTHER; note = 2'-O-methylcytidine-3'-phosphate
  modified_base 5: mod_base = OTHER; note = adenosine-3'-phosphate
  modified_base 6: mod_base = OTHER; note = 2'-O-methyluridine-3'-phosphate
  modified_base 7: mod_base = OTHER; note = adenosine-3'-phosphate
  modified_base 8: mod_base = OTHER; note = adenosine-3'-phosphate
  modified_base 9: mod_base = OTHER; note = 2'-O-methyluridine-3'-phosphate
  modified_base 10: mod_base = OTHER; note = adenosine-3'-phosphate
  modified_base 11: mod_base = OTHER; note = adenosine-3'-phosphate
  modified_base 12: mod_base = OTHER; note = guanosine-3'-phosphate
  modified_base 13: mod_base = OTHER; note = adenosine-3'-phosphate
  modified_base 14: mod_base = OTHER; note = uridine-3'-phosphate
  modified_base 15: mod_base = OTHER; note = guanosine-3'-phosphate
  modified_base 16: mod_base = OTHER; note = guanosine-3'-phosphate
  modified_base 17: mod_base = OTHER; note = cytidine-3'-phosphate
  modified_base 18: mod_base = OTHER; note = uridine-3'-phosphate
  modified_base 19: mod_base = OTHER; note = cytidine-3'-phosphate
  modified_base 20: mod_base = OTHER; note = 2'-deoxythymidine-3'-phosphorothioate
  misc_feature 1..19: note = RNA
  misc_feature 20..21: note = DNA
aggcataataagatggctctt

SEQ ID NO: 455 - DNA, 21 bp, synthetic construct
  source 1..21: mol_type = other DNA
  modified_base 1: mod_base = OTHER; note = adenosine-3'-phosphate
  modified_base 2: mod_base = OTHER; note = guanosine-3'-phosphate
  modified_base 3: mod_base = OTHER; note = 2'-O-methyluridine-3'-phosphate
  modified_base 4: mod_base = OTHER; note = 2'-O-methylcytidine-3'-phosphate
  modified_base 5: mod_base = OTHER; note = 2'-O-methyluridine-3'-phosphate
  modified_base 6: mod_base = OTHER; note = 2'-O-methylcytidine-3'-phosphate
  modified_base 7: mod_base = OTHER; note = adenosine-3'-phosphate
  modified_base 8: mod_base = OTHER; note = guanosine-3'-phosphate
  modified_base 9: mod_base = OTHER; note = 2'-O-methyluridine-3'-phosphate
  modified_base 10: mod_base = OTHER; note = guanosine-3'-phosphate
  modified_base 11: mod_base = OTHER; note = 2'-O-methyluridine-3'-phosphate
  modified_base 12: mod_base = OTHER; note = 2'-O-methyluridine-3'-phosphate
  modified_base 13: mod_base = OTHER; note = guanosine-3'-phosphate
  modified_base 14: mod_base = OTHER; note = guanosine-3'-phosphate
  modified_base 15: mod_base = OTHER; note = adenosine-3'-phosphate
  modified_base 16: mod_base = OTHER; note = adenosine-3'-phosphate
  modified_base 17: mod_base = OTHER; note = 2'-O-methylcytidine-3'-phosphate
  modified_base 18: mod_base = OTHER; note = guanosine-3'-phosphate
  modified_base 19: mod_base = OTHER; note = guanosine-3'-phosphate
  modified_base 20: mod_base = OTHER; note = 2'-deoxythymidine-3'-phosphorothioate
  misc_feature 1..19: note = RNA
  misc_feature 20..21: note = DNA
agtctcagtgttggaacggtt

SEQ ID NO: 456 - DNA, 21 bp, synthetic construct
  source 1..21: mol_type = other DNA
  modified_base 1: mod_base = OTHER; note = cytidine-3'-phosphate
  modified_base 2: mod_base = OTHER; note = cytidine-3'-phosphate
  modified_base 3: mod_base = OTHER; note = guanosine-3'-phosphate
  modified_base 4: mod_base = OTHER; note = uridine-3'-phosphate
  modified_base 5: mod_base = OTHER; note = uridine-3'-phosphate
  modified_base 6: mod_base = OTHER; note = cytidine-3'-phosphate
  modified_base 7: mod_base = OTHER; note = 2'-O-methylcytidine-3'-phosphate
  modified_base 8: mod_base = OTHER; note = adenosine-3'-phosphate
  modified_base 9: mod_base = OTHER; note = adenosine-3'-phosphate
  modified_base 10: mod_base = OTHER; note = 2'-O-methylcytidine-3'-phosphate
  modified_base 11: mod_base = OTHER; note = adenosine-3'-phosphate
  modified_base 12: mod_base = OTHER; note = cytidine-3'-phosphate
  modified_base 13: mod_base = OTHER; note = uridine-3'-phosphate
  modified_base 14: mod_base = OTHER; note = guanosine-3'-phosphate
  modified_base 15: mod_base = OTHER; note = adenosine-3'-phosphate
  modified_base 16: mod_base = OTHER; note = guanosine-3'-phosphate
  modified_base 17: mod_base = OTHER; note = adenosine-3'-phosphate
  modified_base 18: mod_base = OTHER; note = cytidine-3'-phosphate
  modified_base 19: mod_base = OTHER; note = uridine-3'-phosphate
  modified_base 20: mod_base = OTHER; note = 2'-deoxythymidine-3'-phosphorothioate
  misc_feature 1..19: note = RNA
  misc_feature 20..21: note = DNA
ccgttccaacactgagacttt

SEQ ID NO: 457 - DNA, 21 bp, synthetic construct
  source 1..21: mol_type = other DNA
  modified_base 1: mod_base = OTHER; note = 2'-O-methylcytidine-3'-phosphate
  modified_base 2: mod_base = OTHER; note = 2'-O-methyluridine-3'-phosphate
  modified_base 3: mod_base = OTHER; note = 2'-O-methyluridine-3'-phosphate
  modified_base 4: mod_base = OTHER; note = 2'-O-methyluridine-3'-phosphate
  modified_base 5: mod_base = OTHER; note = 2'-O-methyluridine-3'-phosphate
  modified_base 6: mod_base = OTHER; note = adenosine-3'-phosphate
  modified_base 7: mod_base = OTHER; note = guanosine-3'-phosphate
  modified_base 8: mod_base = OTHER; note = guanosine-3'-phosphate
  modified_base 9: mod_base = OTHER; note = adenosine-3'-phosphate
  modified_base 10: mod_base = OTHER; note = guanosine-3'-phosphate
  modified_base 11: mod_base = OTHER; note = adenosine-3'-phosphate
  modified_base 12: mod_base = OTHER; note = 2'-O-methyluridine-3'-phosphate
  modified_base 13: mod_base = OTHER; note = 2'-O-methyluridine-3'-phosphate
  modified_base 14: mod_base = OTHER; note = adenosine-3'-phosphate
  modified_base 15: mod_base = OTHER; note = guanosine-3'-phosphate
  modified_base 16: mod_base = OTHER; note = adenosine-3'-phosphate
  modified_base 17: mod_base = OTHER; note = 2'-O-methyluridine-3'-phosphate
  modified_base 18: mod_base = OTHER; note = 2'-O-methylcytidine-3'-phosphate
  modified_base 19: mod_base = OTHER; note = 2'-O-methylcytidine-3'-phosphate
  modified_base 20: mod_base = OTHER; note = 2'-deoxythymidine-3'-phosphorothioate
  misc_feature 1..19: note = RNA
  misc_feature 20..21: note = DNA
cttttaggagattagatcctt

SEQ ID NO: 458 - DNA, 21 bp, synthetic construct
  source 1..21: mol_type = other DNA
  modified_base 1: mod_base = OTHER; note = guanosine-3'-phosphate
  modified_base 2: mod_base = OTHER; note = guanosine-3'-phosphate
  modified_base 3: mod_base = OTHER; note = adenosine-3'-phosphate
  modified_base 4: mod_base = OTHER; note = uridine-3'-phosphate
  modified_base 5: mod_base = OTHER; note = cytidine-3'-phosphate
  modified_base 6: mod_base = OTHER; note = 2'-O-methyluridine-3'-phosphate
  modified_base 7: mod_base = OTHER; note = adenosine-3'-phosphate
  modified_base 8: mod_base = OTHER; note = adenosine-3'-phosphate
  modified_base 9: mod_base = OTHER; note = uridine-3'-phosphate
  modified_base 10: mod_base = OTHER; note = cytidine-3'-phosphate
  modified_base 11: mod_base = OTHER; note = uridine-3'-phosphate
  modified_base 12: mod_base = OTHER; note = cytidine-3'-phosphate
  modified_base 13: mod_base = OTHER; note = cytidine-3'-phosphate
  modified_base 14: mod_base = OTHER; note = 2'-O-methyluridine-3'-phosphate
  modified_base 15: mod_base = OTHER; note = adenosine-3'-phosphate
  modified_base 16: mod_base = OTHER; note = adenosine-3'-phosphate
  modified_base 17: mod_base = OTHER; note = adenosine-3'-phosphate
  modified_base 18: mod_base = OTHER; note = adenosine-3'-phosphate
  modified_base 19: mod_base = OTHER; note = guanosine-3'-phosphate
  modified_base 20: mod_base = OTHER; note = 2'-deoxythymidine-3'-phosphorothioate
  misc_feature 1..19: note = RNA
  misc_feature 20..21: note = DNA
ggatctaatctcctaaaagtt

SEQ ID NO: 459 - DNA, 21 bp, synthetic construct
  source 1..21: mol_type = other DNA
  modified_base 1: mod_base = OTHER; note = adenosine-3'-phosphate
  modified_base 2: mod_base = OTHER; note = 2'-O-methyluridine-3'-phosphate
  modified_base 3: mod_base = OTHER; note = guanosine-3'-phosphate
  modified_base 4: mod_base = OTHER; note = guanosine-3'-phosphate
  modified_base 5: mod_base = OTHER; note = adenosine-3'-phosphate
  modified_base 6: mod_base = OTHER; note = adenosine-3'-phosphate
  modified_base 7: mod_base = OTHER; note = 2'-O-methylcytidine-3'-phosphate
  modified_base 8: mod_base = OTHER; note = 2'-O-methylcytidine-3'-phosphate
  modified_base 9: mod_base = OTHER; note = 2'-O-methyluridine-3'-phosphate
  modified_base 10: mod_base = OTHER; note = guanosine-3'-phosphate
  modified_base 11: mod_base = OTHER; note = guanosine-3'-phosphate
  modified_base 12: mod_base = OTHER; note = 2'-O-methylcytidine-3'-phosphate
  modified_base 13: mod_base = OTHER; note = guanosine-3'-phosphate
  modified_base 14: mod_base = OTHER; note = adenosine-3'-phosphate
  modified_base 15: mod_base = OTHER; note = adenosine-3'-phosphate
  modified_base 16: mod_base = OTHER; note = adenosine-3'-phosphate
  modified_base 17: mod_base = OTHER; note = guanosine-3'-phosphate
  modified_base 18: mod_base = OTHER; note = 2'-O-methylcytidine-3'-phosphate
  modified_base 19: mod_base = OTHER; note = adenosine-3'-phosphate
  modified_base 20: mod_base = OTHER; note = 2'-deoxythymidine-3'-phosphorothioate
  misc_feature 1..19: note = RNA
  misc_feature 20..21: note = DNA
atggaacctggcgaaagcatt

SEQ ID NO: 460 - DNA, 21 bp, synthetic construct
  source 1..21: mol_type = other DNA
  modified_base 1: mod_base = OTHER; note = uridine-3'-phosphate
  modified_base 2: mod_base = OTHER; note = guanosine-3'-phosphate
  modified_base 3: mod_base = OTHER; note = cytidine-3'-phosphate
  modified_base 4: mod_base = OTHER; note = uridine-3'-phosphate
  modified_base 5: mod_base = OTHER; note = uridine-3'-phosphate
  modified_base 6: mod_base = OTHER; note = uridine-3'-phosphate
  modified_base 7: mod_base = OTHER; note = cytidine-3'-phosphate
  modified_base 8: mod_base = OTHER; note = guanosine-3'-phosphate
  modified_base 9: mod_base = OTHER; note = cytidine-3'-phosphate
  modified_base 10: mod_base = OTHER; note = 2'-O-methylcytidine-3'-phosphate
  modified_base 11: mod_base = OTHER; note = adenosine-3'-phosphate
  modified_base 12: mod_base = OTHER; note = guanosine-3'-phosphate
  modified_base 13: mod_base = OTHER; note = guanosine-3'-phosphate
  modified_base 14: mod_base = OTHER; note = uridine-3'-phosphate
  modified_base 15: mod_base = OTHER; note = uridine-3'-phosphate
  modified_base 16: mod_base = OTHER; note = cytidine-3'-phosphate
  modified_base 17: mod_base = OTHER; note = 2'-O-methylcytidine-3'-phosphate
  modified_base 18: mod_base = OTHER; note = adenosine-3'-phosphate
  modified_base 19: mod_base = OTHER; note = uridine-3'-phosphate
  modified_base 20: mod_base = OTHER; note = 2'-deoxythymidine-3'-phosphorothioate
  misc_feature 1..19: note = RNA
  misc_feature 20..21: note = DNA
tgctttcgccaggttccattt

SEQ ID NO: 461 - DNA, 21 bp, synthetic construct
  source 1..21: mol_type = other DNA
  modified_base 1: mod_base = OTHER; note = 2'-O-methylcytidine-3'-phosphate
  modified_base 2: mod_base = OTHER; note = 2'-O-methyluridine-3'-phosphate
  modified_base 3: mod_base = OTHER; note = adenosine-3'-phosphate
  modified_base 4: mod_base = OTHER; note = 2'-O-methylcytidine-3'-phosphate
  modified_base 5: mod_base = OTHER; note = 2'-O-methylcytidine-3'-phosphate
  modified_base 6: mod_base = OTHER; note = 2'-O-methylcytidine-3'-phosphate
  modified_base 7: mod_base = OTHER; note = 2'-O-methylcytidine-3'-phosphate
  modified_base 8: mod_base = OTHER; note = adenosine-3'-phosphate
  modified_base 9: mod_base = OTHER; note = adenosine-3'-phosphate
  modified_base 10: mod_base = OTHER; note = guanosine-3'-phosphate
  modified_base 11: mod_base = OTHER; note = guanosine-3'-phosphate
  modified_base 12: mod_base = OTHER; note = 2'-O-methylcytidine-3'-phosphate
  modified_base 13: mod_base = OTHER; note = 2'-O-methylcytidine-3'-phosphate
  modified_base 14: mod_base = OTHER; note = guanosine-3'-phosphate
  modified_base 15: mod_base = OTHER; note = adenosine-3'-phosphate
  modified_base 16: mod_base = OTHER; note = adenosine-3'-phosphate
  modified_base 17: mod_base = OTHER; note = guanosine-3'-phosphate
  modified_base 18: mod_base = OTHER; note = 2'-O-methyluridine-3'-phosphate
  modified_base 19: mod_base = OTHER; note = 2'-O-methylcytidine-3'-phosphate
  modified_base 20: mod_base = OTHER; note = 2'-deoxythymidine-3'-phosphorothioate
  misc_feature 1..19: note = RNA
  misc_feature 20..21: note = DNA
ctaccccaaggccgaagtctt

SEQ ID NO: 462 - DNA, 21 bp, synthetic construct
  source 1..21: mol_type = other DNA
  modified_base 1: mod_base = OTHER; note = guanosine-3'-phosphate
  modified_base 2: mod_base = OTHER; note = adenosine-3'-phosphate
  modified_base 3: mod_base = OTHER; note = cytidine-3'-phosphate
  modified_base 4: mod_base = OTHER; note = uridine-3'-phosphate
  modified_base 5: mod_base = OTHER; note = uridine-3'-phosphate
  modified_base 6: mod_base = OTHER; note = cytidine-3'-phosphate
  modified_base 7: mod_base = OTHER; note = guanosine-3'-phosphate
  modified_base 8: mod_base = OTHER; note = guanosine-3'-phosphate
  modified_base 9: mod_base = OTHER; note = cytidine-3'-phosphate
  modified_base 10: mod_base = OTHER; note = cytidine-3'-phosphate
  modified_base 11: mod_base = OTHER; note = uridine-3'-phosphate
  modified_base 12: mod_base = OTHER; note = uridine-3'-phosphate
  modified_base 13: mod_base = OTHER; note = guanosine-3'-phosphate
  modified_base 14: mod_base = OTHER; note = guanosine-3'-phosphate
  modified_base 15: mod_base = OTHER; note = guanosine-3'-phosphate
  modified_base 16: mod_base = OTHER; note = guanosine-3'-phosphate
  modified_base 17: mod_base = OTHER; note = 2'-O-methyluridine-3'-phosphate
  modified_base 18: mod_base = OTHER; note = adenosine-3'-phosphate
  modified_base 19: mod_base = OTHER; note = guanosine-3'-phosphate
  modified_base 20: mod_base = OTHER; note = 2'-deoxythymidine-3'-phosphorothioate
  misc_feature 1..19: note = RNA
  misc_feature 20..21: note = DNA
gacttcggccttggggtagtt

SEQ ID NO: 463 - DNA, 21 bp, synthetic construct
  source 1..21: mol_type = other DNA
  modified_base 1: mod_base = OTHER; note = 2'-O-methyluridine-3'-phosphate
  modified_base 2: mod_base = OTHER; note = guanosine-3'-phosphate
  modified_base 3: mod_base = OTHER; note = guanosine-3'-phosphate
  modified_base 4: mod_base = OTHER; note = adenosine-3'-phosphate
  modified_base 5: mod_base = OTHER; note = adenosine-3'-phosphate
  modified_base 6: mod_base = OTHER; note = 2'-O-methylcytidine-3'-phosphate
  modified_base 7: mod_base = OTHER; note = 2'-O-methylcytidine-3'-phosphate
  modified_base 8: mod_base = OTHER; note = 2'-O-methyluridine-3'-phosphate
  modified_base 9: mod_base = OTHER; note = guanosine-3'-phosphate
  modified_base 10: mod_base = OTHER; note = guanosine-3'-phosphate
  modified_base 11: mod_base = OTHER; note = 2'-O-methylcytidine-3'-phosphate
  modified_base 12: mod_base = OTHER; note = guanosine-3'-phosphate
  modified_base 13: mod_base = OTHER; note = adenosine-3'-phosphate
  modified_base 14: mod_base = OTHER; note = adenosine-3'-phosphate
  modified_base 15: mod_base = OTHER; note = adenosine-3'-phosphate
  modified_base 16: mod_base = OTHER; note = guanosine-3'-phosphate
  modified_base 17: mod_base = OTHER; note = 2'-O-methylcytidine-3'-phosphate
  modified_base 18: mod_base = OTHER; note = adenosine-3'-phosphate
  modified_base 19: mod_base = OTHER; note = guanosine-3'-phosphate
  modified_base 20: mod_base = OTHER; note = 2'-deoxythymidine-3'-phosphorothioate
  misc_feature 1..19: note = RNA
  misc_feature 20..21: note = DNA
tggaacctggcgaaagcagtt

SEQ ID NO: 464 - DNA, 21 bp, synthetic construct
  source 1..21: mol_type = other DNA
  modified_base 1: mod_base = OTHER; note = cytidine-3'-phosphate
  modified_base 2: mod_base = OTHER; note = uridine-3'-phosphate
  modified_base 3: mod_base = OTHER; note = guanosine-3'-phosphate
  modified_base 4: mod_base = OTHER; note = cytidine-3'-phosphate
  modified_base 5: mod_base = OTHER; note = uridine-3'-phosphate
  modified_base 6: mod_base = OTHER; note = uridine-3'-phosphate
  modified_base 7: mod_base = OTHER; note = uridine-3'-phosphate
  modified_base 8: mod_base = OTHER; note = cytidine-3'-phosphate
  modified_base 9: mod_base = OTHER; note = guanosine-3'-phosphate
  modified_base 10: mod_base = OTHER; note = cytidine-3'-phosphate
  modified_base 11: mod_base = OTHER; note = 2'-O-methylcytidine-3'-phosphate
  modified_base 12: mod_base = OTHER; note = adenosine-3'-phosphate
  modified_base 13: mod_base = OTHER; note = guanosine-3'-phosphate
  modified_base 14: mod_base = OTHER; note = guanosine-3'-phosphate
  modified_base 15: mod_base = OTHER; note = uridine-3'-phosphate
  modified_base 16: mod_base = OTHER; note = uridine-3'-phosphate
  modified_base 17: mod_base = OTHER; note = cytidine-3'-phosphate
  modified_base 18: mod_base = OTHER; note = 2'-O-methylcytidine-3'-phosphate
  modified_base 19: mod_base = OTHER; note = adenosine-3'-phosphate
  modified_base 20: mod_base = OTHER; note = 2'-deoxythymidine-3'-phosphorothioate
  misc_feature 1..19: note = RNA
  misc_feature 20..21: note = DNA
ctgctttcgccaggttccatt

SEQ ID NO: 465 - DNA, 21 bp, synthetic construct
  source 1..21: mol_type = other DNA
  modified_base 1: mod_base = OTHER; note = 2'-O-methyluridine-3'-phosphate
  modified_base 2: mod_base = OTHER; note = adenosine-3'-phosphate
  modified_base 3: mod_base = OTHER; note = 2'-O-methyluridine-3'-phosphate
  modified_base 4: mod_base = OTHER; note = guanosine-3'-phosphate
  modified_base 5: mod_base = OTHER; note = 2'-O-methyluridine-3'-phosphate
  modified_base 6: mod_base = OTHER; note = guanosine-3'-phosphate
  modified_base 7: mod_base = OTHER; note = guanosine-3'-phosphate
  modified_base 8: mod_base = OTHER; note = 2'-O-methyluridine-3'-phosphate
  modified_base 9: mod_base = OTHER; note = adenosine-3'-phosphate
  modified_base 10: mod_base = OTHER; note = guanosine-3'-phosphate
  modified_base 11: mod_base = OTHER; note = adenosine-3'-phosphate
  modified_base 12: mod_base = OTHER; note = guanosine-3'-phosphate
  modified_base 13: mod_base = OTHER; note = 2'-O-methyluridine-3'-phosphate
  modified_base 14: mod_base = OTHER; note = adenosine-3'-phosphate
  modified_base 15: mod_base = OTHER; note = 2'-O-methyluridine-3'-phosphate
  modified_base 16: mod_base = OTHER; note = guanosine-3'-phosphate
  modified_base 17: mod_base = OTHER; note = guanosine-3'-phosphate
  modified_base 18: mod_base = OTHER; note = 2'-O-methyluridine-3'-phosphate
  modified_base 19: mod_base = OTHER; note = adenosine-3'-phosphate
  modified_base 20: mod_base = OTHER; note = 2'-deoxythymidine-3'-phosphorothioate
  misc_feature 1..19: note = RNA
  misc_feature 20..21: note = DNA
tatgtggtagagtatggtatt

SEQ ID NO: 466 - DNA, 21 bp, synthetic construct
  source 1..21: mol_type = other DNA
  modified_base 1: mod_base = OTHER; note = 2'-O-methyluridine-3'-phosphate
  modified_base 2: mod_base = OTHER; note = adenosine-3'-phosphate
  modified_base 3: mod_base = OTHER; note = cytidine-3'-phosphate
  modified_base 4: mod_base = OTHER; note = 2'-O-methylcytidine-3'-phosphate
  modified_base 5: mod_base = OTHER; note = adenosine-3'-phosphate
  modified_base 6: mod_base = OTHER; note = 2'-O-methyluridine-3'-phosphate
  modified_base 7: mod_base = OTHER; note = adenosine-3'-phosphate
  modified_base 8: mod_base = OTHER; note = cytidine-3'-phosphate
  modified_base 9: mod_base = OTHER; note = uridine-3'-phosphate
  modified_base 10: mod_base = OTHER; note = cytidine-3'-phosphate
  modified_base 11: mod_base = OTHER; note = 2'-O-methyluridine-3'-phosphate
  modified_base 12: mod_base = OTHER; note = adenosine-3'-phosphate
  modified_base 13: mod_base = OTHER; note = cytidine-3'-phosphate
  modified_base 14: mod_base = OTHER; note = 2'-O-methylcytidine-3'-phosphate
  modified_base 15: mod_base = OTHER; note = adenosine-3'-phosphate
  modified_base 16: mod_base = OTHER; note = 2'-O-methylcytidine-3'-phosphate
  modified_base 17: mod_base = OTHER; note = adenosine-3'-phosphate
  modified_base 18: mod_base = OTHER; note = 2'-O-methyluridine-3'-phosphate
  modified_base 19: mod_base = OTHER; note = adenosine-3'-phosphate
  modified_base 20: mod_base = OTHER; note = 2'-deoxythymidine-3'-phosphorothioate
  misc_feature 1..19: note = RNA
  misc_feature 20..21: note = DNA
taccatactctaccacatatt

SEQ ID NO: 467 - DNA, 21 bp, synthetic construct
  source 1..21: mol_type = other DNA
  modified_base 1: mod_base = OTHER; note = 2'-O-methyluridine-3'-phosphate
  modified_base 2: mod_base = OTHER; note = guanosine-3'-phosphate
  modified_base 3: mod_base = OTHER; note = guanosine-3'-phosphate
  modified_base 4: mod_base = OTHER; note = 2'-O-methyluridine-3'-phosphate
  modified_base 5: mod_base = OTHER; note = 2'-O-methylcytidine-3'-phosphate
  modified_base 6: mod_base = OTHER; note = adenosine-3'-phosphate
  modified_base 7: mod_base = OTHER; note = 2'-O-methyluridine-3'-phosphate
  modified_base 8: mod_base = OTHER; note = 2'-O-methylcytidine-3'-phosphate
  modified_base 9: mod_base = OTHER; note = 2'-O-methylcytidine-3'-phosphate
  modified_base 10: mod_base = OTHER; note = 2'-O-methylcytidine-3'-phosphate
  modified_base 11: mod_base = OTHER; note = adenosine-3'-phosphate
  modified_base 12: mod_base = OTHER; note = guanosine-3'-phosphate
  modified_base 13: mod_base = OTHER; note = adenosine-3'-phosphate
  modified_base 14: mod_base = OTHER; note = adenosine-3'-phosphate
  modified_base 15: mod_base = OTHER; note = 2'-O-methylcytidine-3'-phosphate
  modified_base 16: mod_base = OTHER; note = 2'-O-methyluridine-3'-phosphate
  modified_base 17: mod_base = OTHER; note = adenosine-3'-phosphate
  modified_base 18: mod_base = OTHER; note = 2'-O-methylcytidine-3'-phosphate
  modified_base 19: mod_base = OTHER; note = 2'-O-methylcytidine-3'-phosphate
  modified_base 20: mod_base = OTHER; note = 2'-deoxythymidine-3'-phosphorothioate
  misc_feature 1..19: note = RNA
  misc_feature 20..21: note = DNA
tggtcatcccagaactacctt

SEQ ID NO: 468 - DNA, 21 bp, synthetic construct
  source 1..21: mol_type = other DNA
  modified_base 1: mod_base = OTHER; note = guanosine-3'-phosphate
  modified_base 2: mod_base = OTHER; note = guanosine-3'-phosphate
  modified_base 3: mod_base = OTHER; note = 2'-O-methyluridine-3'-phosphate
  modified_base 4: mod_base = OTHER; note = adenosine-3'-phosphate
  modified_base 5: mod_base = OTHER; note = guanosine-3'-phosphate
  modified_base 6: mod_base = OTHER; note = uridine-3'-phosphate
  modified_base 7: mod_base = OTHER; note = uridine-3'-phosphate
  modified_base 8: mod_base = OTHER; note = cytidine-3'-phosphate
  modified_base 9: mod_base = OTHER; note = uridine-3'-phosphate
  modified_base 10: mod_base = OTHER; note = guanosine-3'-phosphate
  modified_base 11: mod_base = OTHER; note = guanosine-3'-phosphate
  modified_base 12: mod_base = OTHER; note = guanosine-3'-phosphate
  modified_base 13: mod_base = OTHER; note = adenosine-3'-phosphate
  modified_base 14: mod_base = OTHER; note = uridine-3'-phosphate
  modified_base 15: mod_base = OTHER; note = guanosine-3'-phosphate
  modified_base 16: mod_base = OTHER; note = adenosine-3'-phosphate
  modified_base 17: mod_base = OTHER; note = cytidine-3'-phosphate
  modified_base 18: mod_base = OTHER; note = 2'-O-methylcytidine-3'-phosphate
  modified_base 19: mod_base = OTHER; note = adenosine-3'-phosphate
  modified_base 20: mod_base = OTHER; note = 2'-deoxythymidine-3'-phosphorothioate
  misc_feature 1..19: note = RNA
  misc_feature 20..21: note = DNA
ggtagttctgggatgaccatt

SEQ ID NO: 469 - DNA, 21 bp, synthetic construct
  source 1..21: mol_type = other DNA
  modified_base 1: mod_base = OTHER; note = 2'-O-methylcytidine-3'-phosphate
  modified_base 2: mod_base = OTHER; note = adenosine-3'-phosphate
  modified_base 3: mod_base = OTHER; note = 2'-O-methyluridine-3'-phosphate
  modified_base 4: mod_base = OTHER; note = 2'-O-methyluridine-3'-phosphate
  modified_base 5: mod_base = OTHER; note = 2'-O-methyluridine-3'-phosphate
  modified_base 6: mod_base = OTHER; note = adenosine-3'-phosphate
  modified_base 7: mod_base = OTHER; note = 2'-O-methylcytidine-3'-phosphate
  modified_base 8: mod_base = OTHER; note = 2'-O-methyluridine-3'-phosphate
  modified_base 9: mod_base = OTHER; note = guanosine-3'-phosphate
  modified_base 10: mod_base = OTHER; note = 2'-O-methyluridine-3'-phosphate
  modified_base 11: mod_base = OTHER; note = 2'-O-methylcytidine-3'-phosphate
  modified_base 12: mod_base = OTHER; note = adenosine-3'-phosphate
  modified_base 13: mod_base = OTHER; note = 2'-O-methylcytidine-3'-phosphate
  modified_base 14: mod_base = OTHER; note = guanosine-3'-phosphate
  modified_base 15: mod_base = OTHER; note = guanosine-3'-phosphate
  modified_base 16: mod_base = OTHER; note = 2'-O-methyluridine-3'-phosphate
  modified_base 17: mod_base = OTHER; note = 2'-O-methyluridine-3'-phosphate
  modified_base 18: mod_base = OTHER; note = 2'-O-methylcytidine-3'-phosphate
  modified_base 19: mod_base = OTHER; note = 2'-O-methylcytidine-3'-phosphate
  modified_base 20: mod_base = OTHER; note = 2'-deoxythymidine-3'-phosphorothioate
  misc_feature 1..19: note = RNA
  misc_feature 20..21: note = DNA
catttactgtcacggttcctt

SEQ ID NO: 470 - DNA, 21 bp, synthetic construct
  source 1..21: mol_type = other DNA
  modified_base 1: mod_base = OTHER; note = guanosine-3'-phosphate
  modified_base 2: mod_base = OTHER; note = guanosine-3'-phosphate
  modified_base 3: mod_base = OTHER; note = adenosine-3'-phosphate
  modified_base 4: mod_base = OTHER; note = adenosine-3'-phosphate
  modified_base 5: mod_base = OTHER; note = cytidine-3'-phosphate
  modified_base 6: mod_base = OTHER; note = cytidine-3'-phosphate
  modified_base 7: mod_base = OTHER; note = guanosine-3'-phosphate
  modified_base 8: mod_base = OTHER; note = uridine-3'-phosphate
  modified_base 9: mod_base = OTHER; note = guanosine-3'-phosphate
  modified_base 10: mod_base = OTHER; note = adenosine-3'-phosphate
  modified_base 11: mod_base = OTHER; note = 2'-O-methylcytidine-3'-phosphate
  modified_base 12: mod_base = OTHER; note = adenosine-3'-phosphate
  modified_base 13: mod_base = OTHER; note = guanosine-3'-phosphate
  modified_base 14: mod_base = OTHER; note = 2'-O-methyluridine-3'-phosphate
  modified_base 15: mod_base = OTHER; note = adenosine-3'-phosphate
  modified_base 16: mod_base = OTHER; note = adenosine-3'-phosphate
  modified_base 17: mod_base = OTHER; note = adenosine-3'-phosphate
  modified_base 18: mod_base = OTHER; note = uridine-3'-phosphate
  modified_base 19: mod_base = OTHER; note = guanosine-3'-phosphate
  modified_base 20: mod_base = OTHER; note = 2'-deoxythymidine-3'-phosphorothioate
  misc_feature 1..19: note = RNA
  misc_feature 20..21: note = DNA
ggaaccgtgacagtaaatgtt

SEQ ID NO: 471 - DNA, 21 bp, synthetic construct
  source 1..21: mol_type = other DNA
  modified_base 1: mod_base = OTHER; note = guanosine-3'-phosphate
  modified_base 2: mod_base = OTHER; note = guanosine-3'-phosphate
  modified_base 3: mod_base = OTHER; note = adenosine-3'-phosphate
  modified_base 4: mod_base = OTHER; note = guanosine-3'-phosphate
  modified_base 5: mod_base = OTHER; note = 2'-O-methylcytidine-3'-phosphate
  modified_base 6: mod_base = OTHER; note = 2'-O-methylcytidine-3'-phosphate
  modified_base 7: mod_base = OTHER; note = adenosine-3'-phosphate
  modified_base 8: mod_base = OTHER; note = 2'-O-methyluridine-3'-phosphate
  modified_base 9: mod_base = OTHER; note = 2'-O-methylcytidine-3'-phosphate
  modified_base 10: mod_base = OTHER; note = 2'-O-methyluridine-3'-phosphate
  modified_base 11: mod_base = OTHER; note = 2'-O-methyluridine-3'-phosphate
  modified_base 12: mod_base = OTHER; note = adenosine-3'-phosphate
  modified_base 13: mod_base = OTHER; note = 2'-O-methyluridine-3'-phosphate
  modified_base 14: mod_base = OTHER; note = 2'-O-methyluridine-3'-phosphate
  modified_base 15: mod_base = OTHER; note = adenosine-3'-phosphate
  modified_base 16: mod_base = OTHER; note = 2'-O-methyluridine-3'-phosphate
  modified_base 17: mod_base = OTHER; note = guanosine-3'-phosphate
  modified_base 18: mod_base = OTHER; note = 2'-O-methylcytidine-3'-phosphate
  modified_base 19: mod_base = OTHER; note = 2'-O-methylcytidine-3'-phosphate
  modified_base 20: mod_base = OTHER; note = 2'-deoxythymidine-3'-phosphorothioate
  misc_feature 1..19: note = RNA
  misc_feature 20..21: note = DNA
ggagccatcttattatgcctt

SEQ ID NO: 472 - DNA, 21 bp, synthetic construct
  source 1..21: mol_type = other DNA
  modified_base 1: mod_base = OTHER; note = guanosine-3'-phosphate
  modified_base 2: mod_base = OTHER; note = guanosine-3'-phosphate
  modified_base 3: mod_base = OTHER; note = 2'-O-methylcytidine-3'-phosphate
  modified_base 4: mod_base = OTHER; note = adenosine-3'-phosphate
  modified_base 5: mod_base = OTHER; note = 2'-O-methyluridine-3'-phosphate
  modified_base 6: mod_base = OTHER; note = adenosine-3'-phosphate
  modified_base 7: mod_base = OTHER; note = adenosine-3'-phosphate
  modified_base 8: mod_base = OTHER; note = 2'-O-methyluridine-3'-phosphate
  modified_base 9: mod_base = OTHER; note = adenosine-3'-phosphate
  modified_base 10: mod_base = OTHER; note = adenosine-3'-phosphate
  modified_base 11: mod_base = OTHER; note = guanosine-3'-phosphate
  modified_base 12: mod_base = OTHER; note = adenosine-3'-phosphate
  modified_base 13: mod_base = OTHER; note = uridine-3'-phosphate
  modified_base 14: mod_base = OTHER; note = guanosine-3'-phosphate
  modified_base 15: mod_base = OTHER; note = guanosine-3'-phosphate
  modified_base 16: mod_base = OTHER; note = cytidine-3'-phosphate
  modified_base 17: mod_base = OTHER; note = uridine-3'-phosphate
  modified_base 18: mod_base = OTHER; note = cytidine-3'-phosphate
  modified_base 19: mod_base = OTHER; note = cytidine-3'-phosphate
  modified_base 20: mod_base = OTHER; note = 2'-deoxythymidine-3'-phosphorothioate
  misc_feature 1..19: note = RNA
  misc_feature 20..21: note = DNA
ggcataataagatggctcctt

SEQ ID NO: 473 - DNA, 21 bp, synthetic construct
  source 1..21: mol_type = other DNA
  modified_base 1: mod_base = OTHER; note = guanosine-3'-phosphate
  modified_base 2: mod_base = OTHER; note = adenosine-3'-phosphate
  modified_base 3: mod_base = OTHER; note = 2'-O-methylcytidine-3'-phosphate
  modified_base 4: mod_base = OTHER; note = 2'-O-methyluridine-3'-phosphate
  modified_base 5: mod_base = OTHER; note = adenosine-3'-phosphate
  modified_base 6: mod_base = OTHER; note = 2'-O-methylcytidine-3'-phosphate
  modified_base 7: mod_base = OTHER; note = adenosine-3'-phosphate
  modified_base 8: mod_base = OTHER; note = adenosine-3'-phosphate
  modified_base 9: mod_base = OTHER; note = guanosine-3'-phosphate
  modified_base 10: mod_base = OTHER; note = 2'-O-methylcytidine-3'-phosphate
  modified_base 11: mod_base = OTHER; note = guanosine-3'-phosphate
  modified_base 12: mod_base = OTHER; note = adenosine-3'-phosphate
  modified_base 13: mod_base = OTHER; note = adenosine-3'-phosphate
  modified_base 14: mod_base = OTHER; note = 2'-O-methyluridine-3'-phosphate
  modified_base 15: mod_base = OTHER; note = 2'-O-methyluridine-3'-phosphate
  modified_base 16: mod_base = OTHER; note = adenosine-3'-phosphate
  modified_base 17: mod_base = OTHER; note = 2'-O-methylcytidine-3'-phosphate
  modified_base 18: mod_base = OTHER; note = 2'-O-methyluridine-3'-phosphate
  modified_base 19: mod_base = OTHER; note = guanosine-3'-phosphate
  modified_base 20: mod_base = OTHER; note = 2'-deoxythymidine-3'-phosphorothioate
  misc_feature 1..19: note = RNA
  misc_feature 20..21: note = DNA
gactacaagcgaattactgtt

SEQ ID NO: 474 - DNA, 21 bp, synthetic construct
  source 1..21: mol_type = other DNA
  modified_base 1: mod_base = OTHER; note = 2'-O-methylcytidine-3'-phosphate
  modified_base 2: mod_base = OTHER; note = adenosine-3'-phosphate
  modified_base 3: mod_base = OTHER; note = guanosine-3'-phosphate
  modified_base 4: mod_base = OTHER; note = 2'-O-methyluridine-3'-phosphate
  modified_base 5: mod_base = OTHER; note = adenosine-3'-phosphate
  modified_base 6: mod_base = OTHER; note = adenosine-3'-phosphate
  modified_base 7: mod_base = OTHER; note = uridine-3'-phosphate
  modified_base 8: mod_base = OTHER; note = uridine-3'-phosphate
  modified_base 9: mod_base = OTHER; note = cytidine-3'-phosphate
  modified_base 10: mod_base = OTHER; note = guanosine-3'-phosphate
  modified_base 11: mod_base = OTHER; note = cytidine-3'-phosphate
  modified_base 12: mod_base = OTHER; note = uridine-3'-phosphate
  modified_base 13: mod_base = OTHER; note = uridine-3'-phosphate
  modified_base 14: mod_base = OTHER; note = guanosine-3'-phosphate
  modified_base 15: mod_base = OTHER; note = 2'-O-methyluridine-3'-phosphate
  modified_base 16: mod_base = OTHER; note = adenosine-3'-phosphate
  modified_base 17: mod_base = OTHER; note = guanosine-3'-phosphate
  modified_base 18: mod_base = OTHER; note = uridine-3'-phosphate
  modified_base 19: mod_base = OTHER; note = cytidine-3'-phosphate
  modified_base 20: mod_base = OTHER; note = 2'-deoxythymidine-3'-phosphorothioate
  misc_feature 1..19: note = RNA
  misc_feature 20..21: note = DNA
cagtaattcgcttgtagtctt

SEQ ID NO: 475 - DNA, 21 bp, synthetic construct
  source 1..21: mol_type = other DNA
  modified_base 1: mod_base = OTHER; note = 2'-O-methylcytidine-3'-phosphate
  modified_base 2: mod_base = OTHER; note = adenosine-3'-phosphate
  modified_base 3: mod_base = OTHER; note = 2'-O-methyluridine-3'-phosphate
  modified_base 4: mod_base = OTHER; note = adenosine-3'-phosphate
  modified_base 5: mod_base = OTHER; note = 2'-O-methylcytidine-3'-phosphate
  modified_base 6: mod_base = OTHER; note = adenosine-3'-phosphate
  modified_base 7: mod_base = OTHER; note = guanosine-3'-phosphate
  modified_base 8: mod_base = OTHER; note = 2'-O-methylcytidine-3'-phosphate
  modified_base 9: mod_base = OTHER; note = 2'-O-methyluridine-3'-phosphate
  modified_base 10: mod_base = OTHER; note = guanosine-3'-phosphate
  modified_base 11: mod_base = OTHER; note = adenosine-3'-phosphate
  modified_base 12: mod_base = OTHER; note = adenosine-3'-phosphate
  modified_base 13: mod_base = OTHER; note = 2'-O-methyluridine-3'-phosphate
  modified_base 14: mod_base = OTHER; note = 2'-O-methyluridine-3'-phosphate
  modified_base 15: mod_base = OTHER; note = guanosine-3'-phosphate
  modified_base 16: mod_base = OTHER; note = guanosine-3'-phosphate
  modified_base 17: mod_base = OTHER; note = 2'-O-methyluridine-3'-phosphate
  modified_base 18: mod_base = OTHER; note = 2'-O-methylcytidine-3'-phosphate
  modified_base 19: mod_base = OTHER; note = adenosine-3'-phosphate
  modified_base 20: mod_base = OTHER; note = 2'-deoxythymidine-3'-phosphorothioate
  misc_feature 1..19: note = RNA
  misc_feature 20..21: note = DNA
catacagctgaattggtcatt

SEQ ID NO: 476 - DNA, 21 bp, synthetic construct
  source 1..21: mol_type = other DNA
  modified_base 1: mod_base = OTHER; note = uridine-3'-phosphate
  modified_base 2: mod_base = OTHER; note = guanosine-3'-phosphate
  modified_base 3: mod_base = OTHER; note = adenosine-3'-phosphate
  modified_base 4: mod_base = OTHER; note = cytidine-3'-phosphate
  modified_base 5: mod_base = OTHER; note = 2'-O-methylcytidine-3'-phosphate
  modified_base 6: mod_base = OTHER; note = adenosine-3'-phosphate
  modified_base 7: mod_base = OTHER; note = adenosine-3'-phosphate
  modified_base 8: mod_base = OTHER; note = uridine-3'-phosphate
  modified_base 9: mod_base = OTHER; note = uridine-3'-phosphate
  modified_base 10: mod_base = OTHER; note = 2'-O-methylcytidine-3'-phosphate
  modified_base 11: mod_base = OTHER; note = adenosine-3'-phosphate
  modified_base 12: mod_base = OTHER; note = guanosine-3'-phosphate
  modified_base 13: mod_base = OTHER; note = cytidine-3'-phosphate
  modified_base 14: mod_base = OTHER; note = uridine-3'-phosphate
  modified_base 15: mod_base = OTHER; note = guanosine-3'-phosphate
  modified_base 16: mod_base = OTHER; note = 2'-O-methyluridine-3'-phosphate
  modified_base 17: mod_base = OTHER; note = adenosine-3'-phosphate
  modified_base 18: mod_base = OTHER; note = uridine-3'-phosphate
  modified_base 19: mod_base = OTHER; note = guanosine-3'-phosphate
  modified_base 20: mod_base = OTHER; note = 2'-deoxythymidine-3'-phosphorothioate
  misc_feature 1..19: note = RNA
  misc_feature 20..21: note = DNA
tgaccaattcagctgtatgtt

SEQ ID NO: 477 - DNA, 21 bp, synthetic construct
  source 1..21: mol_type = other DNA
  modified_base 1: mod_base = OTHER; note = guanosine-3'-phosphate
  modified_base 2: mod_base = OTHER; note = 2'-O-methylcytidine-3'-phosphate
  modified_base 3: mod_base = OTHER; note = adenosine-3'-phosphate
  modified_base 4: mod_base = OTHER; note = 2'-O-methylcytidine-3'-phosphate
  modified_base 5: mod_base = OTHER; note = 2'-O-methyluridine-3'-phosphate
  modified_base 6: mod_base = OTHER; note = adenosine-3'-phosphate
  modified_base 7: mod_base = OTHER; note = adenosine-3'-phosphate
  modified_base 8: mod_base = OTHER; note = 2'-O-methyluridine-3'-phosphate
  modified_base 9: mod_base = OTHER; note = 2'-O-methyluridine-3'-phosphate
  modified_base 10: mod_base = OTHER; note = guanosine-3'-phosphate
  modified_base 11: mod_base = OTHER; note = 2'-O-methyluridine-3'-phosphate
  modified_base 12: mod_base = OTHER; note = 2'-O-methylcytidine-3'-phosphate
  modified_base 13: mod_base = OTHER; note = 2'-O-methyluridine-3'-phosphate
  modified_base 14: mod_base = OTHER; note = adenosine-3'-phosphate
  modified_base 15: mod_base = OTHER; note = 2'-O-methyluridine-3'-phosphate
  modified_base 16: mod_base = OTHER; note = 2'-O-methyluridine-3'-phosphate
  modified_base 17: mod_base = OTHER; note = guanosine-3'-phosphate
  modified_base 18: mod_base = OTHER; note = guanosine-3'-phosphate
  modified_base 19: mod_base = OTHER; note = guanosine-3'-phosphate
  modified_base 20: mod_base = OTHER; note = 2'-deoxythymidine-3'-phosphorothioate
  misc_feature 1..19: note = RNA
  misc_feature 20..21: note = DNA
gcactaattgtctattgggtt

SEQ ID NO: 478 - DNA, 21 bp, synthetic construct
  source 1..21: mol_type = other DNA
  modified_base 1: mod_base = OTHER; note = cytidine-3'-phosphate
  modified_base 2: mod_base = OTHER; note = cytidine-3'-phosphate
  modified_base 3: mod_base = OTHER; note = 2'-O-methylcytidine-3'-phosphate
  modified_base 4: mod_base = OTHER; note = adenosine-3'-phosphate
  modified_base 5: mod_base = OTHER; note = adenosine-3'-phosphate
  modified_base 6: mod_base = OTHER; note = 2'-O-methyluridine-3'-phosphate
  modified_base 7: mod_base = OTHER; note = adenosine-3'-phosphate
  modified_base 8: mod_base = OTHER; note = guanosine-3'-phosphate
  modified_base 9: mod_base = OTHER; note = adenosine-3'-phosphate
  modified_base 10: mod_base = OTHER; note = 2'-O-methylcytidine-3'-phosphate
  modified_base 11: mod_base = OTHER; note = adenosine-3'-phosphate
  modified_base 12: mod_base = OTHER; note = adenosine-3'-phosphate
  modified_base 13: mod_base = OTHER; note = uridine-3'-phosphate
  modified_base 14: mod_base = OTHER; note = 2'-O-methyluridine-3'-phosphate
  modified_base 15: mod_base = OTHER; note = adenosine-3'-phosphate
  modified_base 16: mod_base = OTHER; note = guanosine-3'-phosphate
  modified_base 17: mod_base = OTHER; note = uridine-3'-phosphate
  modified_base 18: mod_base = OTHER; note = guanosine-3'-phosphate
  modified_base 19: mod_base = OTHER; note = cytidine-3'-phosphate
  modified_base 20: mod_base = OTHER; note = 2'-deoxythymidine-3'-phosphorothioate
  misc_feature 1..19: note = RNA
  misc_feature 20..21: note = DNA
cccaatagacaattagtgctt

SEQ ID NO: 479 - DNA, 21 bp, synthetic construct
  source 1..21: mol_type = other DNA
  modified_base 1: mod_base = OTHER; note = 2'-O-methyluridine-3'-phosphate
  modified_base 2: mod_base = OTHER; note = 2'-O-methyluridine-3'-phosphate
  modified_base 3: mod_base = OTHER; note = 2'-O-methyluridine-3'-phosphate
  modified_base 4: mod_base = OTHER; note = adenosine-3'-phosphate
  modified_base 5: mod_base = OTHER; note = guanosine-3'-phosphate
  modified_base 6: mod_base = OTHER; note = guanosine-3'-phosphate
  modified_base 7: mod_base = OTHER; note = guanosine-3'-phosphate
  modified_base 8: mod_base = OTHER; note = guanosine-3'-phosphate
  modified_base 9: mod_base = OTHER; note = 2'-O-methyluridine-3'-phosphate
  modified_base 10: mod_base = OTHER; note = 2'-O-methyluridine-3'-phosphate
  modified_base 11: mod_base = OTHER; note = 2'-O-methylcytidine-3'-phosphate
  modified_base 12: mod_base = OTHER; note = adenosine-3'-phosphate
  modified_base 13: mod_base = OTHER; note = 2'-O-methyluridine-3'-phosphate
  modified_base 14: mod_base = OTHER; note = 2'-O-methylcytidine-3'-phosphate
  modified_base 15: mod_base = OTHER; note = guanosine-3'-phosphate
  modified_base 16: mod_base = OTHER; note = guanosine-3'-phosphate
  modified_base 17: mod_base = OTHER; note = guanosine-3'-phosphate
  modified_base 18: mod_base = OTHER; note = guanosine-3'-phosphate
  modified_base 19: mod_base = OTHER; note = 2'-O-methylcytidine-3'-phosphate
  modified_base 20: mod_base = OTHER; note = 2'-deoxythymidine-3'-phosphorothioate
  misc_feature 1..19: note = RNA
  misc_feature 20..21: note = DNA
tttaggggttcatcggggctt

SEQ ID NO: 480 - DNA, 21 bp, synthetic construct
  source 1..21: mol_type = other DNA
  modified_base 1: mod_base = OTHER; note = guanosine-3'-phosphate
  modified_base 2: mod_base = OTHER; note = cytidine-3'-phosphate
  modified_base 3: mod_base = OTHER; note = cytidine-3'-phosphate
  modified_base 4: mod_base = OTHER; note = cytidine-3'-phosphate
  modified_base 5: mod_base = OTHER; note = cytidine-3'-phosphate
  modified_base 6: mod_base = OTHER; note = guanosine-3'-phosphate
  modified_base 7: mod_base = OTHER; note = adenosine-3'-phosphate
  modified_base 8: mod_base = OTHER; note = uridine-3'-phosphate
  modified_base 9: mod_base = OTHER; note = guanosine-3'-phosphate
  modified_base 10: mod_base = OTHER; note = adenosine-3'-phosphate
  modified_base 11: mod_base = OTHER; note = adenosine-3'-phosphate
  modified_base 12: mod_base = OTHER; note = cytidine-3'-phosphate
  modified_base 13: mod_base = OTHER; note = cytidine-3'-phosphate
  modified_base 14: mod_base = OTHER; note = cytidine-3'-phosphate
  modified_base 15: mod_base = OTHER; note = cytidine-3'-phosphate
  modified_base 16: mod_base = OTHER; note = 2'-O-methyluridine-3'-phosphate
  modified_base 17: mod_base = OTHER; note = adenosine-3'-phosphate
  modified_base 18: mod_base = OTHER; note = adenosine-3'-phosphate
  modified_base 19: mod_base = OTHER; note = adenosine-3'-phosphate
  modified_base 20: mod_base = OTHER; note = 2'-deoxythymidine-3'-phosphorothioate
  misc_feature 1..19: note = RNA
  misc_feature 20..21: note = DNA
gccccgatgaacccctaaatt

SEQ ID NO: 481 - DNA, 21 bp, synthetic construct
  source 1..21: mol_type = other DNA
  modified_base 1: mod_base = OTHER; note = 2'-O-methylcytidine-3'-phosphate
  modified_base 2: mod_base = OTHER; note = 2'-O-methyluridine-3'-phosphate
  modified_base 3: mod_base = OTHER; note = 2'-O-methylcytidine-3'-phosphate
  modified_base 4: mod_base = OTHER; note = adenosine-3'-phosphate
  modified_base 5: mod_base = OTHER; note = adenosine-3'-phosphate
  modified_base 6: mod_base = OTHER; note = 2'-O-methylcytidine-3'-phosphate
  modified_base 7: mod_base = OTHER; note = 2'-O-methylcytidine-3'-phosphate
  modified_base 8: mod_base = OTHER; note = 2'-O-methyluridine-3'-phosphate
  modified_base 9: mod_base = OTHER; note = guanosine-3'-phosphate
  modified_base 10: mod_base = OTHER; note = 2'-O-methyluridine-3'-phosphate
  modified_base 11: mod_base = OTHER; note = guanosine-3'-phosphate
  modified_base 12: mod_base = OTHER; note = guanosine-3'-phosphate
  modified_base 13: mod_base = OTHER; note = 2'-O-methyluridine-3'-phosphate
  modified_base 14: mod_base = OTHER; note = 2'-O-methyluridine-3'-phosphate
  modified_base 15: mod_base = OTHER; note = 2'-O-methyluridine-3'-phosphate
  modified_base 16: mod_base = OTHER; note = adenosine-3'-phosphate
  modified_base 17: mod_base = OTHER; note = guanosine-3'-phosphate
  modified_base 18: mod_base = OTHER; note = guanosine-3'-phosphate
  modified_base 19: mod_base = OTHER; note = guanosine-3'-phosphate
  modified_base 20: mod_base = OTHER; note = 2'-deoxythymidine-3'-phosphorothioate
  misc_feature 1..19: note = RNA
  misc_feature 20..21: note = DNA
ctcaacctgtggtttagggtt

SEQ ID NO: 482 - DNA, 21 bp, synthetic construct
  source 1..21: mol_type = other DNA
  modified_base 1: mod_base = OTHER; note = cytidine-3'-phosphate
  modified_base 2: mod_base = OTHER; note = cytidine-3'-phosphate
  modified_base 3: mod_base = OTHER; note = cytidine-3'-phosphate
  modified_base 4: mod_base = OTHER; note = 2'-O-methyluridine-3'-phosphate
  modified_base 5: mod_base = OTHER; note = adenosine-3'-phosphate
  modified_base 6: mod_base = OTHER; note = adenosine-3'-phosphate
  modified_base 7: mod_base = OTHER; note = adenosine-3'-phosphate
  modified_base 8: mod_base = OTHER; note = cytidine-3'-phosphate
  modified_base 9: mod_base = OTHER; note = 2'-O-methylcytidine-3'-phosphate
  modified_base 10: mod_base = OTHER; note = adenosine-3'-phosphate
  modified_base 11: mod_base = OTHER; note = 2'-O-methylcytidine-3'-phosphate
  modified_base 12: mod_base = OTHER; note = adenosine-3'-phosphate
  modified_base 13: mod_base = OTHER; note = guanosine-3'-phosphate
  modified_base 14: mod_base = OTHER; note = guanosine-3'-phosphate
  modified_base 15: mod_base = OTHER; note = uridine-3'-phosphate
  modified_base 16: mod_base = OTHER; note = uridine-3'-phosphate
  modified_base 17: mod_base = OTHER; note = guanosine-3'-phosphate
  modified_base 18: mod_base = OTHER; note = adenosine-3'-phosphate
  modified_base 19: mod_base = OTHER; note = guanosine-3'-phosphate
  modified_base 20: mod_base = OTHER; note = 2'-deoxythymidine-3'-phosphorothioate
  misc_feature 1..19: note = RNA
  misc_feature 20..21: note = DNA
ccctaaaccacaggttgagtt

SEQ ID NO: 483 - DNA, 21 bp, synthetic construct
  source 1..21: mol_type = other DNA
  modified_base 1: mod_base = OTHER; note = 2'-O-methylcytidine-3'-phosphate
  modified_base 2: mod_base = OTHER; note = 2'-O-methylcytidine-3'-phosphate
  modified_base 3: mod_base = OTHER; note = 2'-O-methyluridine-3'-phosphate
  modified_base 4: mod_base = OTHER; note = adenosine-3'-phosphate
  modified_base 5: mod_base = OTHER; note = adenosine-3'-phosphate
  modified_base 6: mod_base = OTHER; note = 2'-O-methyluridine-3'-phosphate
  modified_base 7: mod_base = OTHER; note = 2'-O-methyluridine-3'-phosphate
  modified_base 8: mod_base = OTHER; note = 2'-O-methyluridine-3'-phosphate
  modified_base 9: mod_base = OTHER; note = guanosine-3'-phosphate
  modified_base 10: mod_base = OTHER; note = adenosine-3'-phosphate
  modified_base 11: mod_base = OTHER; note = guanosine-3'-phosphate
  modified_base 12: mod_base = OTHER; note = guanosine-3'-phosphate
  modified_base 13: mod_base = OTHER; note = guanosine-3'-phosphate
  modified_base 14: mod_base = OTHER; note = 2'-O-methyluridine-3'-phosphate
  modified_base 15: mod_base = OTHER; note = 2'-O-methylcytidine-3'-phosphate
  modified_base 16: mod_base = OTHER; note = adenosine-3'-phosphate
  modified_base 17: mod_base = OTHER; note = guanosine-3'-phosphate
  modified_base 18: mod_base = OTHER; note = 2'-O-methyluridine-3'-phosphate
  modified_base 19: mod_base = OTHER; note = 2'-O-methyluridine-3'-phosphate
  modified_base 20: mod_base = OTHER; note = 2'-deoxythymidine-3'-phosphorothioate
  misc_feature 1..19: note = RNA
  misc_feature 20..21: note = DNA
cctaatttgagggtcagtttt

SEQ ID NO: 484 - DNA, 21 bp, synthetic construct
  source 1..21: mol_type = other DNA
  modified_base 1: mod_base = OTHER; note = adenosine-3'-phosphate
  modified_base 2: mod_base = OTHER; note = adenosine-3'-phosphate
  modified_base 3: mod_base = OTHER; note = cytidine-3'-phosphate
  modified_base 4: mod_base = OTHER; note = uridine-3'-phosphate
  modified_base 5: mod_base = OTHER; note = guanosine-3'-phosphate
  modified_base 6: mod_base = OTHER; note = adenosine-3'-phosphate
  modified_base 7: mod_base = OTHER; note = cytidine-3'-phosphate
  modified_base 8: mod_base = OTHER; note = cytidine-3'-phosphate
  modified_base 9: mod_base = OTHER; note = cytidine-3'-phosphate
  modified_base 10: mod_base = OTHER; note = uridine-3'-phosphate
  modified_base 11: mod_base = OTHER; note = 2'-O-methylcytidine-3'-phosphate
  modified_base 12: mod_base = OTHER; note = adenosine-3'-phosphate
  modified_base 13: mod_base = OTHER; note = adenosine-3'-phosphate
  modified_base 14: mod_base = OTHER; note = adenosine-3'-phosphate
  modified_base 15: mod_base = OTHER; note = uridine-3'-phosphate
  modified_base 16: mod_base = OTHER; note = 2'-O-methyluridine-3'-phosphate
  modified_base 17: mod_base = OTHER; note = adenosine-3'-phosphate
  modified_base 18: mod_base = OTHER; note = guanosine-3'-phosphate
  modified_base 19: mod_base = OTHER; note = guanosine-3'-phosphate
  modified_base 20: mod_base = OTHER; note = 2'-deoxythymidine-3'-phosphorothioate
  misc_feature 1..19: note = RNA
  misc_feature 20..21: note = DNA
aactgaccctcaaattaggtt

SEQ ID NO: 485 - DNA, 21 bp, synthetic construct
  source 1..21: mol_type = other DNA
  modified_base 1: mod_base = OTHER; note = 2'-O-methyluridine-3'-phosphate
  modified_base 2: mod_base = OTHER; note = 2'-O-methylcytidine-3'-phosphate
  modified_base 3: mod_base = OTHER; note = 2'-O-methyluridine-3'-phosphate
  modified_base 4: mod_base = OTHER; note = 2'-O-methylcytidine-3'-phosphate
  modified_base 5: mod_base = OTHER; note = adenosine-3'-phosphate
  modified_base 6: mod_base = OTHER; note = adenosine-3'-phosphate
  modified_base 7: mod_base = OTHER; note = 2'-O-methylcytidine-3'-phosphate
  modified_base 8: mod_base = OTHER; note = 2'-O-methylcytidine-3'-phosphate
  modified_base 9: mod_base = OTHER; note = 2'-O-methyluridine-3'-phosphate
  modified_base 10: mod_base = OTHER; note = guanosine-3'-phosphate
  modified_base 11: mod_base = OTHER; note = 2'-O-methyluridine-3'-phosphate
  modified_base 12: mod_base = OTHER; note = guanosine-3'-phosphate
  modified_base 13: mod_base = OTHER; note = guanosine-3'-phosphate
  modified_base 14: mod_base = OTHER; note = 2'-O-methyluridine-3'-phosphate
  modified_base 15: mod_base = OTHER; note = 2'-O-methyluridine-3'-phosphate
  modified_base 16: mod_base = OTHER; note = 2'-O-methyluridine-3'-phosphate
  modified_base 17: mod_base = OTHER; note = adenosine-3'-phosphate
  modified_base 18: mod_base = OTHER; note = guanosine-3'-phosphate
  modified_base 19: mod_base = OTHER; note = guanosine-3'-phosphate
  modified_base 20: mod_base = OTHER; note = 2'-deoxythymidine-3'-phosphorothioate
  misc_feature 1..19: note = RNA
  misc_feature 20..21: note = DNA
tctcaacctgtggtttaggtt

SEQ ID NO: 486 - DNA, 21 bp, synthetic construct
  source 1..21: mol_type = other DNA
  modified_base 1: mod_base = OTHER; note = cytidine-3'-phosphate
  modified_base 2: mod_base = OTHER; note = cytidine-3'-phosphate
  modified_base 3: mod_base = OTHER; note = 2'-O-methyluridine-3'-phosphate
  modified_base 4: mod_base = OTHER; note = adenosine-3'-phosphate
  modified_base 5: mod_base = OTHER; note = adenosine-3'-phosphate
  modified_base 6: mod_base = OTHER; note = adenosine-3'-phosphate
  modified_base 7: mod_base = OTHER; note = cytidine-3'-phosphate
  modified_base 8: mod_base = OTHER; note = 2'-O-methylcytidine-3'-phosphate
  modified_base 9: mod_base = OTHER; note = adenosine-3'-phosphate
  modified_base 10: mod_base = OTHER; note = 2'-O-methylcytidine-3'-phosphate
  modified_base 11: mod_base = OTHER; note = adenosine-3'-phosphate
  modified_base 12: mod_base = OTHER; note = guanosine-3'-phosphate
  modified_base 13: mod_base = OTHER; note = guanosine-3'-phosphate
  modified_base 14: mod_base = OTHER; note = uridine-3'-phosphate
  modified_base 15: mod_base = OTHER; note = uridine-3'-phosphate
  modified_base 16: mod_base = OTHER; note = guanosine-3'-phosphate
  modified_base 17: mod_base = OTHER; note = adenosine-3'-phosphate
  modified_base 18: mod_base = OTHER; note = guanosine-3'-phosphate
  modified_base 19: mod_base = OTHER; note = adenosine-3'-phosphate
  modified_base 20: mod_base = OTHER; note = 2'-deoxythymidine-3'-phosphorothioate
  misc_feature 1..19: note = RNA
  misc_feature 20..21: note = DNA
cctaaaccacaggttgagatt

SEQ ID NO: 487 - DNA, 21 bp, synthetic construct
  source 1..21: mol_type = other DNA
  modified_base 1: mod_base = OTHER; note = 2'-O-methyluridine-3'-phosphate
  modified_base 2: mod_base = OTHER; note = 2'-O-methyluridine-3'-phosphate
  modified_base 3: mod_base = OTHER; note = 2'-O-methyluridine-3'-phosphate
  modified_base 4: mod_base = OTHER; note = adenosine-3'-phosphate
  modified_base 5: mod_base = OTHER; note = guanosine-3'-phosphate
  modified_base 6: mod_base = OTHER; note = guanosine-3'-phosphate
  modified_base 7: mod_base = OTHER; note = adenosine-3'-phosphate
  modified_base 8: mod_base = OTHER; note = guanosine-3'-phosphate
  modified_base 9: mod_base = OTHER; note = adenosine-3'-phosphate
  modified_base 10: mod_base = OTHER; note = 2'-O-methyluridine-3'-phosphate
  modified_base 11: mod_base = OTHER; note = 2'-O-methyluridine-3'-phosphate
  modified_base 12: mod_base = OTHER; note = adenosine-3'-phosphate
  modified_base 13: mod_base = OTHER; note = guanosine-3'-phosphate
  modified_base 14: mod_base = OTHER; note = adenosine-3'-phosphate
  modified_base 15: mod_base = OTHER; note = 2'-O-methyluridine-3'-phosphate
  modified_base 16: mod_base = OTHER; note = 2'-O-methylcytidine-3'-phosphate
  modified_base 17: mod_base = OTHER; note = 2'-O-methylcytidine-3'-phosphate
  modified_base 18: mod_base = OTHER; note = 2'-O-methyluridine-3'-phosphate
  modified_base 19: mod_base = OTHER; note = guanosine-3'-phosphate
  modified_base 20: mod_base = OTHER; note = 2'-deoxythymidine-3'-phosphorothioate
  misc_feature 1..19: note = RNA
  misc_feature 20..21: note = DNA
tttaggagattagatcctgtt

SEQ ID NO: 488 - DNA, 21 bp, synthetic construct
  source 1..21: mol_type = other DNA
  modified_base 1: mod_base = OTHER; note = 2'-O-methylcytidine-3'-phosphate
  modified_base 2: mod_base = OTHER; note = adenosine-3'-phosphate
  modified_base 3: mod_base = OTHER; note = guanosine-3'-phosphate
  modified_base 4: mod_base = OTHER; note = guanosine-3'-phosphate
  modified_base 5: mod_base = OTHER; note = adenosine-3'-phosphate
  modified_base 6: mod_base = OTHER; note = uridine-3'-phosphate
  modified_base 7: mod_base = OTHER; note = cytidine-3'-phosphate
  modified_base 8: mod_base = OTHER; note = 2'-O-methyluridine-3'-phosphate
  modified_base 9: mod_base = OTHER; note = adenosine-3'-phosphate
  modified_base 10: mod_base = OTHER; note = adenosine-3'-phosphate
  modified_base 11: mod_base = OTHER; note = uridine-3'-phosphate
  modified_base 12: mod_base = OTHER; note = cytidine-3'-phosphate
  modified_base 13: mod_base = OTHER; note = uridine-3'-phosphate
  modified_base 14: mod_base = OTHER; note = cytidine-3'-phosphate
  modified_base 15: mod_base = OTHER; note = cytidine-3'-phosphate
  modified_base 16: mod_base = OTHER; note = 2'-O-methyluridine-3'-phosphate
  modified_base 17: mod_base = OTHER; note = adenosine-3'-phosphate
  modified_base 18: mod_base = OTHER; note = adenosine-3'-phosphate
  modified_base 19: mod_base = OTHER; note = adenosine-3'-phosphate
  modified_base 20: mod_base = OTHER; note = 2'-deoxythymidine-3'-phosphorothioate
  misc_feature 1..19: note = RNA
  misc_feature 20..21: note = DNA
caggatctaatctcctaaatt

SEQ ID NO: 489 - DNA, 21 bp, synthetic construct
  source 1..21: mol_type = other DNA
  modified_base 1: mod_base = OTHER; note = 2'-O-methylcytidine-3'-phosphate
  modified_base 2: mod_base = OTHER; note = 2'-O-methylcytidine-3'-phosphate
  modified_base 3: mod_base = OTHER; note = adenosine-3'-phosphate
  modified_base 4: mod_base = OTHER; note = 2'-O-methyluridine-3'-phosphate
  modified_base 5: mod_base = OTHER; note = 2'-O-methyluridine-3'-phosphate
  modified_base 6: mod_base = OTHER; note = guanosine-3'-phosphate
  modified_base 7: mod_base = OTHER; note = 2'-O-methylcytidine-3'-phosphate
  modified_base 8: mod_base = OTHER; note = 2'-O-methyluridine-3'-phosphate
  modified_base 9: mod_base = OTHER; note = 2'-O-methylcytidine-3'-phosphate
  modified_base 10: mod_base = OTHER; note = adenosine-3'-phosphate
  modified_base 11: mod_base = OTHER; note = 2'-O-methyluridine-3'-phosphate
  modified_base 12: mod_base = OTHER; note = 2'-O-methylcytidine-3'-phosphate
  modified_base 13: mod_base = OTHER; note = 2'-O-methylcytidine-3'-phosphate
  modified_base 14: mod_base = OTHER; note = 2'-O-methyluridine-3'-phosphate
  modified_base 15: mod_base = OTHER; note = adenosine-3'-phosphate
  modified_base 16: mod_base = OTHER; note = guanosine-3'-phosphate
  modified_base 17: mod_base = OTHER; note = guanosine-3'-phosphate
  modified_base 18: mod_base = OTHER; note = adenosine-3'-phosphate
  modified_base 19: mod_base = OTHER; note = adenosine-3'-phosphate
  modified_base 20: mod_base = OTHER; note = 2'-deoxythymidine-3'-phosphorothioate
  misc_feature 1..19: note = RNA
  misc_feature 20..21: note = DNA
ccattgctcatcctaggaatt

SEQ ID NO: 490 - DNA, 21 bp, synthetic construct
  source 1..21: mol_type = other DNA
  modified_base 1: mod_base = OTHER; note = uridine-3'-phosphate
  modified_base 2: mod_base = OTHER; note = uridine-3'-phosphate
  modified_base 3: mod_base = OTHER; note = cytidine-3'-phosphate
  modified_base 4: mod_base = OTHER; note = cytidine-3'-phosphate
  modified_base 5: mod_base = OTHER; note = 2'-O-methyluridine-3'-phosphate
  modified_base 6: mod_base = OTHER; note = adenosine-3'-phosphate
  modified_base 7: mod_base = OTHER; note = guanosine-3'-phosphate
  modified_base 8: mod_base = OTHER; note = guanosine-3'-phosphate
  modified_base 9: mod_base = OTHER; note = adenosine-3'-phosphate
  modified_base 10: mod_base = OTHER; note = uridine-3'-phosphate
  modified_base 11: mod_base = OTHER; note = guanosine-3'-phosphate
  modified_base 12: mod_base = OTHER; note = adenosine-3'-phosphate
  modified_base 13: mod_base = OTHER; note = guanosine-3'-phosphate
  modified_base 14: mod_base = OTHER; note = 2'-O-methylcytidine-3'-phosphate
  modified_base 15: mod_base = OTHER; note = adenosine-3'-phosphate
  modified_base 16: mod_base = OTHER; note = adenosine-3'-phosphate
  modified_base 17: mod_base = OTHER; note = uridine-3'-phosphate
  modified_base 18: mod_base = OTHER; note = guanosine-3'-phosphate
  modified_base 19: mod_base = OTHER; note = guanosine-3'-phosphate
  modified_base 20: mod_base = OTHER; note = 2'-deoxythymidine-3'-phosphorothioate
  misc_feature 1..19: note = RNA
  misc_feature 20..21: note = DNA
ttcctaggatgagcaatggtt

SEQ ID NO: 491 - DNA, 21 bp, synthetic construct
  source 1..21: mol_type = other DNA
  modified_base 1: mod_base = OTHER; note = 2'-O-methylcytidine-3'-phosphate
  modified_base 2: mod_base = OTHER; note = 2'-O-methylcytidine-3'-phosphate
  modified_base 3: mod_base = OTHER; note = 2'-O-methylcytidine-3'-phosphate
  modified_base 4: mod_base = OTHER; note = adenosine-3'-phosphate
  modified_base 5: mod_base = OTHER; note = adenosine-3'-phosphate
  modified_base 6: mod_base = OTHER; note = guanosine-3'-phosphate
  modified_base 7: mod_base = OTHER; note = guanosine-3'-phosphate
  modified_base 8: mod_base = OTHER; note = adenosine-3'-phosphate
  modified_base 9: mod_base = OTHER; note = 2'-O-methylcytidine-3'-phosphate
  modified_base 10: mod_base = OTHER; note = 2'-O-methylcytidine-3'-phosphate
  modified_base 11: mod_base = OTHER; note = 2'-O-methyluridine-3'-phosphate
  modified_base 12: mod_base = OTHER; note = adenosine-3'-phosphate
  modified_base 13: mod_base = OTHER; note = 2'-O-methyluridine-3'-phosphate
  modified_base 14: mod_base = OTHER; note = adenosine-3'-phosphate
  modified_base 15: mod_base = OTHER; note = 2'-O-methyluridine-3'-phosphate
  modified_base 16: mod_base = OTHER; note = guanosine-3'-phosphate
  modified_base 17: mod_base = OTHER; note = 2'-O-methyluridine-3'-phosphate
  modified_base 18: mod_base = OTHER; note = guanosine-3'-phosphate
  modified_base 19: mod_base = OTHER; note = guanosine-3'-phosphate
  modified_base 20: mod_base = OTHER; note = 2'-deoxythymidine-3'-phosphorothioate
  misc_feature 1..19: note = RNA
  misc_feature 20..21: note = DNA
cccaaggacctatatgtggtt

SEQ ID NO: 492 - DNA, 21 bp, synthetic construct
  source 1..21: mol_type = other DNA
  modified_base 1: mod_base = OTHER; note = cytidine-3'-phosphate
  modified_base 2: mod_base = OTHER; note = 2'-O-methylcytidine-3'-phosphate
  modified_base 3: mod_base = OTHER; note = adenosine-3'-phosphate
  modified_base 4: mod_base = OTHER; note = 2'-O-methylcytidine-3'-phosphate
  modified_base 5: mod_base = OTHER; note = adenosine-3'-phosphate
  modified_base 6: mod_base = OTHER; note = 2'-O-methyluridine-3'-phosphate
  modified_base 7: mod_base = OTHER; note = adenosine-3'-phosphate
  modified_base 8: mod_base = OTHER; note = 2'-O-methyluridine-3'-phosphate
  modified_base 9: mod_base = OTHER; note = adenosine-3'-phosphate
  modified_base 10: mod_base = OTHER; note = guanosine-3'-phosphate
  modified_base 11: mod_base = OTHER; note = guanosine-3'-phosphate
  modified_base 12: mod_base = OTHER; note = uridine-3'-phosphate
  modified_base 13: mod_base = OTHER; note = cytidine-3'-phosphate
  modified_base 14: mod_base = OTHER; note = cytidine-3'-phosphate
  modified_base 15: mod_base = OTHER; note = uridine-3'-phosphate
  modified_base 16: mod_base = OTHER; note = uridine-3'-phosphate
  modified_base 17: mod_base = OTHER; note = guanosine-3'-phosphate
  modified_base 18: mod_base = OTHER; note = guanosine-3'-phosphate
  modified_base 19: mod_base = OTHER; note = guanosine-3'-phosphate
  modified_base 20: mod_base = OTHER; note = 2'-deoxythymidine-3'-phosphorothioate
  misc_feature 1..19: note = RNA
  misc_feature 20..21: note = DNA
ccacatataggtccttgggtt

SEQ ID NO: 493 - DNA, 21 bp, synthetic construct
  source 1..21: mol_type = other DNA
  modified_base 1: mod_base = OTHER; note = guanosine-3'-phosphate
  modified_base 2: mod_base = OTHER; note = adenosine-3'-phosphate
  modified_base 3: mod_base = OTHER; note = 2'-O-methylcytidine-3'-phosphate
  modified_base 4: mod_base = OTHER; note = guanosine-3'-phosphate
  modified_base 5: mod_base = OTHER; note = guanosine-3'-phosphate
  modified_base 6: mod_base = OTHER; note = guanosine-3'-phosphate
  modified_base 7: mod_base = OTHER; note = 2'-O-methyluridine-3'-phosphate
  modified_base 8: mod_base = OTHER; note = 2'-O-methyluridine-3'-phosphate
  modified_base 9: mod_base = OTHER; note = guanosine-3'-phosphate
  modified_base 10: mod_base = OTHER; note = adenosine-3'-phosphate
  modified_base 11: mod_base = OTHER; note = guanosine-3'-phosphate
  modified_base 12: mod_base = OTHER; note = adenosine-3'-phosphate
  modified_base 13: mod_base = OTHER; note = adenosine-3'-phosphate
  modified_base 14: mod_base = OTHER; note = 2'-O-methyluridine-3'-phosphate
  modified_base 15: mod_base = OTHER; note = 2'-O-methylcytidine-3'-phosphate
  modified_base 16: mod_base = OTHER; note = 2'-O-methylcytidine-3'-phosphate
  modified_base 17: mod_base = OTHER; note = 2'-O-methylcytidine-3'-phosphate
  modified_base 18: mod_base = OTHER; note = 2'-O-methyluridine-3'-phosphate
  modified_base 19: mod_base = OTHER; note = adenosine-3'-phosphate
  modified_base 20: mod_base = OTHER; note = 2'-deoxythymidine-3'-phosphorothioate
  misc_feature 1..19: note = RNA
  misc_feature 20..21: note = DNA
gacgggttgagaatccctatt

SEQ ID NO: 494 - DNA, 21 bp, synthetic construct
  source 1..21: mol_type = other DNA
  modified_base 1: mod_base = OTHER; note = 2'-O-methyluridine-3'-phosphate
  modified_base 2: mod_base = OTHER; note = adenosine-3'-phosphate
  modified_base 3: mod_base = OTHER; note = guanosine-3'-phosphate
  modified_base 4: mod_base = OTHER; note = guanosine-3'-phosphate
  modified_base 5: mod_base = OTHER; note = guanosine-3'-phosphate
  modified_base 6: mod_base = OTHER; note = adenosine-3'-phosphate
  modified_base 7: mod_base = OTHER; note = uridine-3'-phosphate
  modified_base 8: mod_base = OTHER; note = uridine-3'-phosphate
  modified_base 9: mod_base = OTHER; note = cytidine-3'-phosphate
  modified_base 10: mod_base = OTHER; note = uridine-3'-phosphate
  modified_base 11: mod_base = OTHER; note = 2'-O-methylcytidine-3'-phosphate
  modified_base 12: mod_base = OTHER; note = adenosine-3'-phosphate
  modified_base 13: mod_base = OTHER; note = adenosine-3'-phosphate
  modified_base 14: mod_base = OTHER; note = cytidine-3'-phosphate
  modified_base 15: mod_base = OTHER; note = cytidine-3'-phosphate
  modified_base 16: mod_base = OTHER; note = cytidine-3'-phosphate
  modified_base 17: mod_base = OTHER; note = guanosine-3'-phosphate
  modified_base 18: mod_base = OTHER; note = uridine-3'-phosphate
  modified_base 19: mod_base = OTHER; note = cytidine-3'-phosphate
  modified_base 20: mod_base = OTHER; note = 2'-deoxythymidine-3'-phosphorothioate
  misc_feature 1..19: note = RNA
  misc_feature 20..21: note = DNA
tagggattctcaacccgtctt

SEQ ID NO: 495 - DNA, 21 bp, synthetic construct
  source 1..21: mol_type = other DNA
  modified_base 1: mod_base = OTHER; note = guanosine-3'-phosphate
  modified_base 2: mod_base = OTHER; note = 2'-O-methylcytidine-3'-phosphate
  modified_base 3: mod_base = OTHER; note = 2'-O-methyluridine-3'-phosphate
  modified_base 4: mod_base = OTHER; note = guanosine-3'-phosphate
  modified_base 5: mod_base = OTHER; note = 2'-O-methylcytidine-3'-phosphate
  modified_base 6: mod_base = OTHER; note = adenosine-3'-phosphate
  modified_base 7: mod_base = OTHER; note = 2'-O-methylcytidine-3'-phosphate
  modified_base 8: mod_base = OTHER; note = 2'-O-methyluridine-3'-phosphate
  modified_base 9: mod_base = OTHER; note = adenosine-3'-phosphate
  modified_base 10: mod_base = OTHER; note = adenosine-3'-phosphate
  modified_base 11: mod_base = OTHER; note = 2'-O-methyluridine-3'-phosphate
  modified_base 12: mod_base = OTHER; note = 2'-O-methyluridine-3'-phosphate
  modified_base 13: mod_base = OTHER; note = guanosine-3'-phosphate
  modified_base 14: mod_base = OTHER; note = 2'-O-methyluridine-3'-phosphate
  modified_base 15: mod_base = OTHER; note = 2'-O-methylcytidine-3'-phosphate
  modified_base 16: mod_base = OTHER; note = 2'-O-methyluridine-3'-phosphate
  modified_base 17: mod_base = OTHER; note = adenosine-3'-phosphate
  modified_base 18: mod_base = OTHER; note = 2'-O-methyluridine-3'-phosphate
  modified_base 19: mod_base = OTHER; note = 2'-O-methyluridine-3'-phosphate
  modified_base 20: mod_base = OTHER; note = 2'-deoxythymidine-3'-phosphorothioate
  misc_feature 1..19: note = RNA
  misc_feature 20..21: note = DNA
gctgcactaattgtctatttt

SEQ ID NO: 496 - DNA, 21 bp, synthetic construct
  source 1..21: mol_type = other DNA
  modified_base 1: mod_base = OTHER; note = adenosine-3'-phosphate
  modified_base 2: mod_base = OTHER; note = adenosine-3'-phosphate
  modified_base 3: mod_base = OTHER; note = 2'-O-methyluridine-3'-phosphate
  modified_base 4: mod_base = OTHER; note = adenosine-3'-phosphate
  modified_base 5: mod_base = OTHER; note = guanosine-3'-phosphate
  modified_base 6: mod_base = OTHER; note = adenosine-3'-phosphate
  modified_base 7: mod_base = OTHER; note = 2'-O-methylcytidine-3'-phosphate
  modified_base 8: mod_base = OTHER; note = adenosine-3'-phosphate
  modified_base 9: mod_base = OTHER; note = adenosine-3'-phosphate
  modified_base 10: mod_base = OTHER; note = uridine-3'-phosphate
  modified_base 11: mod_base = OTHER; note = 2'-O-methyluridine-3'-phosphate
  modified_base 12: mod_base = OTHER; note = adenosine-3'-phosphate
  modified_base 13: mod_base = OTHER; note = guanosine-3'-phosphate
  modified_base 14: mod_base = OTHER; note = uridine-3'-phosphate
  modified_base 15: mod_base = OTHER; note = guanosine-3'-phosphate
  modified_base 16: mod_base = OTHER; note = 2'-O-methylcytidine-3'-phosphate
  modified_base 17: mod_base = OTHER; note = adenosine-3'-phosphate
  modified_base 18: mod_base = OTHER; note = guanosine-3'-phosphate
  modified_base 19: mod_base = OTHER; note = cytidine-3'-phosphate
  modified_base 20: mod_base = OTHER; note = 2'-deoxythymidine-3'-phosphorothioate
  misc_feature 1..19: note = RNA
  misc_feature 20..21: note = DNA
aatagacaattagtgcagctt

SEQ ID NO: 497 - DNA, 21 bp, synthetic construct
  source 1..21: mol_type = other DNA
  modified_base 1: mod_base = OTHER; note = 2'-O-methyluridine-3'-phosphate
  modified_base 2: mod_base = OTHER; note = 2'-O-methyluridine-3'-phosphate
  modified_base 3: mod_base = OTHER; note = adenosine-3'-phosphate
  modified_base 4: mod_base = OTHER; note = 2'-O-methylcytidine-3'-phosphate
  modified_base 5: mod_base = OTHER; note = 2'-O-methyluridine-3'-phosphate
  modified_base 6: mod_base = OTHER; note = guanosine-3'-phosphate
  modified_base 7: mod_base = OTHER; note = 2'-O-methyluridine-3'-phosphate
  modified_base 8: mod_base = OTHER; note = 2'-O-methylcytidine-3'-phosphate
  modified_base 9: mod_base = OTHER; note = adenosine-3'-phosphate
  modified_base 10: mod_base = OTHER; note = 2'-O-methylcytidine-3'-phosphate
  modified_base 11: mod_base = OTHER; note = guanosine-3'-phosphate
  modified_base 12: mod_base = OTHER; note = guanosine-3'-phosphate
  modified_base 13: mod_base = OTHER; note = 2'-O-methyluridine-3'-phosphate
  modified_base 14: mod_base = OTHER; note = 2'-O-methyluridine-3'-phosphate
  modified_base 15: mod_base = OTHER; note = 2'-O-methylcytidine-3'-phosphate
  modified_base 16: mod_base = OTHER; note = 2'-O-methylcytidine-3'-phosphate
  modified_base 17: mod_base = OTHER; note = 2'-O-methylcytidine-3'-phosphate
  modified_base 18: mod_base = OTHER; note = adenosine-3'-phosphate
  modified_base 19: mod_base = OTHER; note = adenosine-3'-phosphate
  modified_base 20: mod_base = OTHER; note = 2'-deoxythymidine-3'-phosphorothioate
  misc_feature 1..19: note = RNA
  misc_feature 20..21: note = DNA
ttactgtcacggttcccaatt

SEQ ID NO: 498 - DNA, 21 bp, synthetic construct
  source 1..21: mol_type = other DNA
  modified_base 1: mod_base = OTHER; note = uridine-3'-phosphate
  modified_base 2: mod_base = OTHER; note = uridine-3'-phosphate
  modified_base 3: mod_base = OTHER; note = guanosine-3'-phosphate
  modified_base 4: mod_base = OTHER; note = guanosine-3'-phosphate
  modified_base 5: mod_base = OTHER; note = guanosine-3'-phosphate
  modified_base 6: mod_base = OTHER; note = adenosine-3'-phosphate
  modified_base 7: mod_base = OTHER; note = adenosine-3'-phosphate
  modified_base 8: mod_base = OTHER; note = cytidine-3'-phosphate
  modified_base 9: mod_base = OTHER; note = cytidine-3'-phosphate
  modified_base 10: mod_base = OTHER; note = guanosine-3'-phosphate
  modified_base 11: mod_base = OTHER; note = uridine-3'-phosphate
  modified_base 12: mod_base = OTHER; note = guanosine-3'-phosphate
  modified_base 13: mod_base = OTHER; note = adenosine-3'-phosphate
  modified_base 14: mod_base = OTHER; note = 2'-O-methylcytidine-3'-phosphate
  modified_base 15: mod_base = OTHER; note = adenosine-3'-phosphate
  modified_base 16: mod_base = OTHER; note = guanosine-3'-phosphate
  modified_base 17: mod_base = OTHER; note = 2'-O-methyluridine-3'-phosphate
  modified_base 18: mod_base = OTHER; note = adenosine-3'-phosphate
  modified_base 19: mod_base = OTHER; note = adenosine-3'-phosphate
  modified_base 20: mod_base = OTHER; note = 2'-deoxythymidine-3'-phosphorothioate
  misc_feature 1..19: note = RNA
  misc_feature 20..21: note = DNA
ttgggaaccgtgacagtaatt

SEQ ID NO: 499 - DNA, 21 bp, synthetic construct
  source 1..21: mol_type = other DNA
  modified_base 1: mod_base = OTHER; note = 2'-O-methyluridine-3'-phosphate
  modified_base 2: mod_base = OTHER; note = 2'-O-methyluridine-3'-phosphate
  modified_base 3: mod_base = OTHER; note = guanosine-3'-phosphate
  modified_base 4: mod_base = OTHER; note = guanosine-3'-phosphate
  modified_base 5: mod_base = OTHER; note = 2'-O-methyluridine-3'-phosphate
  modified_base 6: mod_base = OTHER; note = 2'-O-methylcytidine-3'-phosphate
  modified_base 7: mod_base = OTHER; note = adenosine-3'-phosphate
  modified_base 8: mod_base = OTHER; note = 2'-O-methyluridine-3'-phosphate
  modified_base 9: mod_base = OTHER; note = 2'-O-methylcytidine-3'-phosphate
  modified_base 10: mod_base = OTHER; note = 2'-O-methylcytidine-3'-phosphate
  modified_base 11: mod_base = OTHER; note = 2'-O-methylcytidine-3'-phosphate
  modified_base 12: mod_base = OTHER; note = adenosine-3'-phosphate
  modified_base 13: mod_base = OTHER; note = guanosine-3'-phosphate
  modified_base 14: mod_base = OTHER; note = adenosine-3'-phosphate
  modified_base 15: mod_base = OTHER; note = adenosine-3'-phosphate
  modified_base 16: mod_base = OTHER; note = 2'-O-methylcytidine-3'-phosphate
  modified_base 17: mod_base = OTHER; note = 2'-O-methyluridine-3'-phosphate
  modified_base 18: mod_base = OTHER; note = adenosine-3'-phosphate
  modified_base 19: mod_base = OTHER; note = 2'-O-methylcytidine-3'-phosphate
  modified_base 20: mod_base = OTHER; note = 2'-deoxythymidine-3'-phosphorothioate
  misc_feature 1..19: note = RNA
  misc_feature 20..21: note = DNA
ttggtcatcccagaactactt

SEQ ID NO: 500 - DNA, 21 bp, synthetic construct
  source 1..21: mol_type = other DNA
  modified_base 1: mod_base = OTHER; note = guanosine-3'-phosphate
  modified_base 2: mod_base = OTHER; note = 2'-O-methyluridine-3'-phosphate
  modified_base 3: mod_base = OTHER; note = adenosine-3'-phosphate
  modified_base 4: mod_base = OTHER; note = guanosine-3'-phosphate
  modified_base 5: mod_base = OTHER; note = uridine-3'-phosphate
  modified_base 6: mod_base = OTHER; note = uridine-3'-phosphate
  modified_base 7: mod_base = OTHER; note = cytidine-3'-phosphate
  modified_base 8: mod_base = OTHER; note = uridine-3'-phosphate
  modified_base 9: mod_base = OTHER; note = guanosine-3'-phosphate
  modified_base 10: mod_base = OTHER; note = guanosine-3'-phosphate
  modified_base 11: mod_base = OTHER; note = guanosine-3'-phosphate
  modified_base 12: mod_base = OTHER; note = adenosine-3'-phosphate
  modified_base 13: mod_base = OTHER; note = uridine-3'-phosphate
  modified_base 14: mod_base = OTHER; note = guanosine-3'-phosphate
  modified_base 15: mod_base = OTHER; note = adenosine-3'-phosphate
  modified_base 16: mod_base = OTHER; note = cytidine-3'-phosphate
  modified_base 17: mod_base = OTHER; note = 2'-O-methylcytidine-3'-phosphate
  modified_base 18: mod_base = OTHER; note = adenosine-3'-phosphate
  modified_base 19: mod_base = OTHER; note = adenosine-3'-phosphate
  modified_base 20: mod_base = OTHER; note = 2'-deoxythymidine-3'-phosphorothioate
  misc_feature 1..19: note = RNA
  misc_feature 20..21: note = DNA
gtagttctgggatgaccaatt

SEQ ID NO: 501 - DNA, 21 bp, synthetic construct
  source 1..21: mol_type = other DNA
  modified_base 1: mod_base = OTHER; note = guanosine-3'-phosphate
  modified_base 2: mod_base = OTHER; note = 2'-O-methyluridine-3'-phosphate
  modified_base 3: mod_base = OTHER; note = guanosine-3'-phosphate
  modified_base 4: mod_base = OTHER; note = guanosine-3'-phosphate
  modified_base 5: mod_base = OTHER; note = 2'-O-methyluridine-3'-phosphate
  modified_base 6: mod_base = OTHER; note = guanosine-3'-phosphate
  modified_base 7: mod_base = OTHER; note = 2'-O-methylcytidine-3'-phosphate
  modified_base 8: mod_base = OTHER; note = 2'-O-methylcytidine-3'-phosphate
  modified_base 9: mod_base = OTHER; note = guanosine-3'-phosphate
  modified_base 10: mod_base = OTHER; note = adenosine-3'-phosphate
  modified_base 11: mod_base = OTHER; note = 2'-O-methylcytidine-3'-phosphate
  modified_base 12: mod_base = OTHER; note = 2'-O-methyluridine-3'-phosphate
  modified_base 13: mod_base = OTHER; note = adenosine-3'-phosphate
  modified_base 14: mod_base = OTHER; note = 2'-O-methylcytidine-3'-phosphate
  modified_base 15: mod_base = OTHER; note = adenosine-3'-phosphate
  modified_base 16: mod_base = OTHER; note = adenosine-3'-phosphate
  modified_base 17: mod_base = OTHER; note = guanosine-3'-phosphate
  modified_base 18: mod_base = OTHER; note = 2'-O-methylcytidine-3'-phosphate
  modified_base 19: mod_base = OTHER; note = guanosine-3'-phosphate
  modified_base 20: mod_base = OTHER; note = 2'-deoxythymidine-3'-phosphorothioate
  misc_feature 1..19: note = RNA
  misc_feature 20..21: note = DNA
gtggtgccgactacaagcgtt

SEQ ID NO: 502 - DNA, 21 bp, synthetic construct
  source 1..21: mol_type = other DNA
  modified_base 1: mod_base = OTHER; note = cytidine-3'-phosphate
  modified_base 2: mod_base = OTHER; note = guanosine-3'-phosphate
  modified_base 3: mod_base = OTHER; note = cytidine-3'-phosphate
  modified_base 4: mod_base = OTHER; note = uridine-3'-phosphate
  modified_base 5: mod_base = OTHER; note = uridine-3'-phosphate
  modified_base 6: mod_base = OTHER; note = guanosine-3'-phosphate
  modified_base 7: mod_base = OTHER; note = 2'-O-methyluridine-3'-phosphate
  modified_base 8: mod_base = OTHER; note = adenosine-3'-phosphate
  modified_base 9: mod_base = OTHER; note = guanosine-3'-phosphate
  modified_base 10: mod_base = OTHER; note = uridine-3'-phosphate
  modified_base 11: mod_base = OTHER; note = cytidine-3'-phosphate
  modified_base 12: mod_base = OTHER; note = guanosine-3'-phosphate
  modified_base 13: mod_base = OTHER; note = guanosine-3'-phosphate
  modified_base 14: mod_base = OTHER; note = 2'-O-methylcytidine-3'-phosphate
  modified_base 15: mod_base = OTHER; note = adenosine-3'-phosphate
  modified_base 16: mod_base = OTHER; note = cytidine-3'-phosphate
  modified_base 17: mod_base = OTHER; note = 2'-O-methylcytidine-3'-phosphate
  modified_base 18: mod_base = OTHER; note = adenosine-3'-phosphate
  modified_base 19: mod_base = OTHER; note = cytidine-3'-phosphate
  modified_base 20: mod_base = OTHER; note = 2'-deoxythymidine-3'-phosphorothioate
  misc_feature 1..19: note = RNA
  misc_feature 20..21: note = DNA
cgcttgtagtcggcaccactt

SEQ ID NO: 503 - DNA, 21 bp, synthetic construct
  source 1..21: mol_type = other DNA
  modified_base 1: mod_base = OTHER; note = 2'-O-methylcytidine-3'-phosphate
  modified_base 2: mod_base = OTHER; note = 2'-O-methylcytidine-3'-phosphate
  modified_base 3: mod_base = OTHER; note = guanosine-3'-phosphate
  modified_base 4: mod_base = OTHER; note = 2'-O-methyluridine-3'-phosphate
  modified_base 5: mod_base = OTHER; note = guanosine-3'-phosphate
  modified_base 6: mod_base = OTHER; note = guanosine-3'-phosphate
  modified_base 7: mod_base = OTHER; note = guanosine-3'-phosphate
  modified_base 8: mod_base = OTHER; note = adenosine-3'-phosphate
  modified_base 9: mod_base = OTHER; note = 2'-O-methyluridine-3'-phosphate
  modified_base 10: mod_base = OTHER; note = guanosine-3'-phosphate
  modified_base 11: mod_base = OTHER; note = 2'-O-methylcytidine-3'-phosphate
  modified_base 12: mod_base = OTHER; note = adenosine-3'-phosphate
  modified_base 13: mod_base = OTHER; note = guanosine-3'-phosphate
  modified_base 14: mod_base = OTHER; note = guanosine-3'-phosphate
  modified_base 15: mod_base = OTHER; note = 2'-O-methylcytidine-3'-phosphate
  modified_base 16: mod_base = OTHER; note = adenosine-3'-phosphate
  modified_base 17: mod_base = OTHER; note = adenosine-3'-phosphate
  modified_base 18: mod_base = OTHER; note = 2'-O-methyluridine-3'-phosphate
  modified_base 19: mod_base = OTHER; note = guanosine-3'-phosphate
  modified_base 20: mod_base = OTHER; note = 2'-deoxythymidine-3'-phosphorothioate
  misc_feature 1..19: note = RNA
  misc_feature 20..21: note = DNA
ccgtgggatgcaggcaatgtt

SEQ ID NO: 504 - DNA, 21 bp, synthetic construct
  source 1..21: mol_type = other DNA
  modified_base 1: mod_base = OTHER; note = 2'-O-methylcytidine-3'-phosphate
  modified_base 2: mod_base = OTHER; note = adenosine-3'-phosphate
  modified_base 3: mod_base = OTHER; note = uridine-3'-phosphate
  modified_base 4: mod_base = OTHER; note = uridine-3'-phosphate
  modified_base 5: mod_base = OTHER; note = guanosine-3'-phosphate
  modified_base 6: mod_base = OTHER; note = cytidine-3'-phosphate
  modified_base 7: mod_base = OTHER; note = cytidine-3'-phosphate
  modified_base 8: mod_base = OTHER; note = uridine-3'-phosphate
  modified_base 9: mod_base = OTHER; note = guanosine-3'-phosphate
  modified_base 10: mod_base = OTHER; note = 2'-O-methylcytidine-3'-phosphate
  modified_base 11: mod_base = OTHER; note = adenosine-3'-phosphate
  modified_base 12: mod_base = OTHER; note = uridine-3'-phosphate
  modified_base 13: mod_base = OTHER; note = cytidine-3'-phosphate
  modified_base 14: mod_base = OTHER; note = cytidine-3'-phosphate
  modified_base 15: mod_base = OTHER; note = 2'-O-methylcytidine-3'-phosphate
  modified_base 16: mod_base = OTHER; note = adenosine-3'-phosphate
  modified_base 17: mod_base = OTHER; note = cytidine-3'-phosphate
  modified_base 18: mod_base = OTHER; note = guanosine-3'-phosphate
  modified_base 19: mod_base = OTHER; note = guanosine-3'-phosphate
  modified_base 20: mod_base = OTHER; note = 2'-deoxythymidine-3'-phosphorothioate
  misc_feature 1..19: note = RNA
  misc_feature 20..21: note = DNA
cattgcctgcatcccacggtt

SEQ ID NO: 505 - DNA, 21 bp, synthetic construct
  source 1..21: mol_type = other DNA
  modified_base 1: mod_base = OTHER; note = 2'-O-methylcytidine-3'-phosphate
  modified_base 2: mod_base = OTHER; note = 2'-O-methylcytidine-3'-phosphate
  modified_base 3: mod_base = OTHER; note = adenosine-3'-phosphate
  modified_base 4: mod_base = OTHER; note = 2'-O-methyluridine-3'-phosphate
  modified_base 5: mod_base = OTHER; note = 2'-O-methylcytidine-3'-phosphate
  modified_base 6: mod_base = OTHER; note = 2'-O-methyluridine-3'-phosphate
  modified_base 7: mod_base = OTHER; note = 2'-O-methyluridine-3'-phosphate
  modified_base 8: mod_base = OTHER; note = adenosine-3'-phosphate
  modified_base 9: mod_base = OTHER; note = 2'-O-methyluridine-3'-phosphate
  modified_base 10: mod_base = OTHER; note = 2'-O-methyluridine-3'-phosphate
  modified_base 11: mod_base = OTHER; note = adenosine-3'-phosphate
  modified_base 12: mod_base = OTHER; note = 2'-O-methyluridine-3'-phosphate
  modified_base 13: mod_base = OTHER; note = guanosine-3'-phosphate
  modified_base 14: mod_base = OTHER; note = 2'-O-methylcytidine-3'-phosphate
  modified_base 15: mod_base = OTHER; note = 2'-O-methylcytidine-3'-phosphate
  modified_base 16: mod_base = OTHER; note = 2'-O-methyluridine-3'-phosphate
  modified_base 17: mod_base = OTHER; note = 2'-O-methyluridine-3'-phosphate
  modified_base 18: mod_base = OTHER; note = guanosine-3'-phosphate
  modified_base 19: mod_base = OTHER; note = guanosine-3'-phosphate
  modified_base 20: mod_base = OTHER; note = 2'-deoxythymidine-3'-phosphorothioate
  misc_feature 1..19: note = RNA
  misc_feature 20..21: note = DNA
ccatcttattatgccttggtt

SEQ ID NO: 506 - DNA, 21 bp, synthetic construct
  source 1..21: mol_type = other DNA
  modified_base 1: mod_base = OTHER; note = cytidine-3'-phosphate
  modified_base 2: mod_base = OTHER; note = 2'-O-methylcytidine-3'-phosphate
  modified_base 3: mod_base = OTHER; note = adenosine-3'-phosphate
  modified_base 4: mod_base = OTHER; note = adenosine-3'-phosphate
  modified_base 5: mod_base = OTHER; note = guanosine-3'-phosphate
  modified_base 6: mod_base = OTHER; note = guanosine-3'-phosphate
  modified_base 7: mod_base = OTHER; note = 2'-O-methylcytidine-3'-phosphate
  modified_base 8: mod_base = OTHER; note = adenosine-3'-phosphate
  modified_base 9: mod_base = OTHER; note = 2'-O-methyluridine-3'-phosphate
  modified_base 10: mod_base = OTHER; note = adenosine-3'-phosphate
  modified_base 11: mod_base = OTHER; note = adenosine-3'-phosphate
  modified_base 12: mod_base = OTHER; note = 2'-O-methyluridine-3'-phosphate
  modified_base 13: mod_base = OTHER; note = adenosine-3'-phosphate
  modified_base 14: mod_base = OTHER; note = adenosine-3'-phosphate
  modified_base 15: mod_base = OTHER; note = guanosine-3'-phosphate
  modified_base 16: mod_base = OTHER; note = adenosine-3'-phosphate
  modified_base 17: mod_base = OTHER; note = uridine-3'-phosphate
  modified_base 18: mod_base = OTHER; note = guanosine-3'-phosphate
  modified_base 19: mod_base = OTHER; note = guanosine-3'-phosphate
  modified_base 20: mod_base = OTHER; note = 2'-deoxythymidine-3'-phosphorothioate
  misc_feature 1..19: note = RNA
  misc_feature 20..21: note = DNA
ccaaggcataataagatggtt

SEQ ID NO: 507 - DNA, 21 bp, synthetic construct
  source 1..21: mol_type = other DNA
  modified_base 1: mod_base = OTHER; note = 2'-O-methyluridine-3'-phosphate
  modified_base 2: mod_base = OTHER; note = guanosine-3'-phosphate
  modified_base 3: mod_base = OTHER; note = adenosine-3'-phosphate
  modified_base 4: mod_base = OTHER; note = adenosine-3'-phosphate
  modified_base 5: mod_base = OTHER; note = 2'-O-methylcytidine-3'-phosphate
  modified_base 6: mod_base = OTHER; note = guanosine-3'-phosphate
  modified_base 7: mod_base = OTHER; note = 2'-O-methylcytidine-3'-phosphate
  modified_base 8: mod_base = OTHER; note = adenosine-3'-phosphate
  modified_base 9: mod_base = OTHER; note = 2'-O-methyluridine-3'-phosphate
  modified_base 10: mod_base = OTHER; note = 2'-O-methyluridine-3'-phosphate
  modified_base 11: mod_base = OTHER; note = 2'-O-methyluridine-3'-phosphate
  modified_base 12: mod_base = OTHER; note = adenosine-3'-phosphate
  modified_base 13: mod_base = OTHER; note = 2'-O-methylcytidine-3'-phosphate
  modified_base 14: mod_base = OTHER; note = 2'-O-methyluridine-3'-phosphate
  modified_base 15: mod_base = OTHER; note = guanosine-3'-phosphate
  modified_base 16: mod_base = OTHER; note = 2'-O-methyluridine-3'-phosphate
  modified_base 17: mod_base = OTHER; note = 2'-O-methylcytidine-3'-phosphate
  modified_base 18: mod_base = OTHER; note = adenosine-3'-phosphate
  modified_base 19: mod_base = OTHER; note = 2'-O-methylcytidine-3'-phosphate
  modified_base 20: mod_base = OTHER; note = 2'-deoxythymidine-3'-phosphorothioate
  misc_feature 1..19: note = RNA
  misc_feature 20..21: note = DNA
tgaacgcatttactgtcactt

SEQ ID NO: 508 - DNA, 21 bp, synthetic construct
  source 1..21: mol_type = other DNA
  modified_base 1: mod_base = OTHER; note = guanosine-3'-phosphate
  modified_base 2: mod_base = OTHER; note = uridine-3'-phosphate
  modified_base 3: mod_base = OTHER; note = guanosine-3'-phosphate
  modified_base 4: mod_base = OTHER; note = adenosine-3'-phosphate
  modified_base 5: mod_base = OTHER; note = 2'-O-methylcytidine-3'-phosphate
  modified_base 6: mod_base = OTHER; note = adenosine-3'-phosphate
  modified_base 7: mod_base = OTHER; note = guanosine-3'-phosphate
  modified_base 8: mod_base = OTHER; note = 2'-O-methyluridine-3'-phosphate
  modified_base 9: mod_base = OTHER; note = adenosine-3'-phosphate
  modified_base 10: mod_base = OTHER; note = adenosine-3'-phosphate
  modified_base 11: mod_base = OTHER; note = adenosine-3'-phosphate
  modified_base 12: mod_base = OTHER; note = uridine-3'-phosphate
  modified_base 13: mod_base = OTHER; note = guanosine-3'-phosphate
  modified_base 14: mod_base = OTHER; note = cytidine-3'-phosphate
  modified_base 15: mod_base = OTHER; note = guanosine-3'-phosphate
  modified_base 16: mod_base = OTHER; note = uridine-3'-phosphate
  modified_base 17: mod_base = OTHER; note = uridine-3'-phosphate
  modified_base 18: mod_base = OTHER; note = 2'-O-methylcytidine-3'-phosphate
  modified_base 19: mod_base = OTHER; note = adenosine-3'-phosphate
  modified_base 20: mod_base = OTHER; note = 2'-deoxythymidine-3'-phosphorothioate
  misc_feature 1..19: note = RNA
  misc_feature 20..21: note = DNA
gtgacagtaaatgcgttcatt

SEQ ID NO: 509 - DNA, 21 bp, synthetic construct
  source 1..21: mol_type = other DNA
  modified_base 1: mod_base = OTHER; note = guanosine-3'-phosphate
  modified_base 2: mod_base = OTHER; note = guanosine-3'-phosphate
  modified_base 3: mod_base = OTHER; note = 2'-O-methyluridine-3'-phosphate
  modified_base 4: mod_base = OTHER; note = guanosine-3'-phosphate
  modified_base 5: mod_base = OTHER; note = 2'-O-methyluridine-3'-phosphate
  modified_base 6: mod_base = OTHER; note = adenosine-3'-phosphate
  modified_base 7: mod_base = OTHER; note = guanosine-3'-phosphate
  modified_base 8: mod_base = OTHER; note = 2'-O-methylcytidine-3'-phosphate
  modified_base 9: mod_base = OTHER; note = adenosine-3'-phosphate
  modified_base 10: mod_base = OTHER; note = 2'-O-methylcytidine-3'-phosphate
  modified_base 11: mod_base = OTHER; note = 2'-O-methyluridine-3'-phosphate
  modified_base 12: mod_base = OTHER; note = guanosine-3'-phosphate
  modified_base 13: mod_base = OTHER; note = adenosine-3'-phosphate
  modified_base 14: mod_base = OTHER; note = 2'-O-methylcytidine-3'-phosphate
  modified_base 15: mod_base = OTHER; note = adenosine-3'-phosphate
  modified_base 16: mod_base = OTHER; note = 2'-O-methyluridine-3'-phosphate
  modified_base 17: mod_base = OTHER; note = 2'-O-methyluridine-3'-phosphate
  modified_base 18: mod_base = OTHER; note = 2'-O-methylcytidine-3'-phosphate
  modified_base 19: mod_base = OTHER; note = adenosine-3'-phosphate
  modified_base 20: mod_base = OTHER; note = 2'-deoxythymidine-3'-phosphorothioate
  misc_feature 1..19: note = RNA
  misc_feature 20..21: note = DNA
ggtgtagcactgacattcatt

SEQ ID NO: 510 - DNA, 21 bp, synthetic construct
  source 1..21: mol_type = other DNA
  modified_base 1: mod_base = OTHER; note = uridine-3'-phosphate
  modified_base 2: mod_base = OTHER; note = guanosine-3'-phosphate
  modified_base 3: mod_base = OTHER; note = adenosine-3'-phosphate
  modified_base 4: mod_base = OTHER; note = adenosine-3'-phosphate
  modified_base 5: mod_base = OTHER; note = uridine-3'-phosphate
  modified_base 6: mod_base = OTHER; note = guanosine-3'-phosphate
  modified_base 7: mod_base = OTHER; note = uridine-3'-phosphate
  modified_base 8: mod_base = OTHER; note = 2'-O-methylcytidine-3'-phosphate
  modified_base 9: mod_base = OTHER; note = adenosine-3'-phosphate
  modified_base 10: mod_base = OTHER; note = guanosine-3'-phosphate
  modified_base 11: mod_base = OTHER; note = uridine-3'-phosphate
  modified_base 12: mod_base = OTHER; note = guanosine-3'-phosphate
  modified_base 13: mod_base = OTHER; note = cytidine-3'-phosphate
  modified_base 14: mod_base = OTHER; note = 2'-O-methyluridine-3'-phosphate
  modified_base 15: mod_base = OTHER; note = adenosine-3'-phosphate
  modified_base 16: mod_base = OTHER; note = 2'-O-methylcytidine-3'-phosphate
  modified_base 17: mod_base = OTHER; note = adenosine-3'-phosphate
  modified_base 18: mod_base = OTHER; note = cytidine-3'-phosphate
  modified_base 19: mod_base = OTHER; note = cytidine-3'-phosphate
  modified_base 20: mod_base = OTHER; note = 2'-deoxythymidine-3'-phosphorothioate
  misc_feature 1..19: note = RNA
  misc_feature 20..21: note = DNA
tgaatgtcagtgctacacctt

SEQ ID NO: 511 - DNA, 21 bp, synthetic construct
  source 1..21: mol_type = other DNA
  modified_base 1: mod_base = OTHER; note = 2'-O-methylcytidine-3'-phosphate
  modified_base 2: mod_base = OTHER; note = 2'-O-methyluridine-3'-phosphate
  modified_base 3: mod_base = OTHER; note = guanosine-3'-phosphate
  modified_base 4: mod_base = OTHER; note = adenosine-3'-phosphate
  modified_base 5: mod_base = OTHER; note = adenosine-3'-phosphate
  modified_base 6: mod_base = OTHER; note = 2'-O-methylcytidine-3'-phosphate
  modified_base 7: mod_base = OTHER; note = guanosine-3'-phosphate
  modified_base 8: mod_base = OTHER; note = 2'-O-methylcytidine-3'-phosphate
  modified_base 9: mod_base = OTHER; note = adenosine-3'-phosphate
  modified_base 10: mod_base = OTHER; note = 2'-O-methyluridine-3'-phosphate
  modified_base 11: mod_base = OTHER; note = 2'-O-methyluridine-3'-phosphate
  modified_base 12: mod_base = OTHER; note = 2'-O-methyluridine-3'-phosphate
  modified_base 13: mod_base = OTHER; note = adenosine-3'-phosphate
  modified_base 14: mod_base = OTHER; note = 2'-O-methylcytidine-3'-phosphate
  modified_base 15: mod_base = OTHER; note = 2'-O-methyluridine-3'-phosphate
  modified_base 16: mod_base = OTHER; note = guanosine-3'-phosphate
  modified_base 17: mod_base = OTHER; note = 2'-O-methyluridine-3'-phosphate
  modified_base 18: mod_base = OTHER; note = 2'-O-methylcytidine-3'-phosphate
  modified_base 19: mod_base = OTHER; note = adenosine-3'-phosphate
  modified_base 20: mod_base = OTHER; note = 2'-deoxythymidine-3'-phosphorothioate
  misc_feature 1..19: note = RNA
  misc_feature 20..21: note = DNA
ctgaacgcatttactgtcatt

SEQ ID NO: 512 - DNA, 21 bp, synthetic construct
  source 1..21: mol_type = other DNA
  modified_base 1: mod_base = OTHER; note = uridine-3'-phosphate
  modified_base 2: mod_base = OTHER; note = guanosine-3'-phosphate
  modified_base 3: mod_base = OTHER; note = adenosine-3'-phosphate
  modified_base 4: mod_base = OTHER; note = 2'-O-methylcytidine-3'-phosphate
  modified_base 5: mod_base = OTHER; note = adenosine-3'-phosphate
  modified_base 6: mod_base = OTHER; note = guanosine-3'-phosphate
  modified_base 7: mod_base = OTHER; note = 2'-O-methyluridine-3'-phosphate
  modified_base 8: mod_base = OTHER; note = adenosine-3'-phosphate
  modified_base 9: mod_base = OTHER; note = adenosine-3'-phosphate
  modified_base 10: mod_base = OTHER; note = adenosine-3'-phosphate
  modified_base 11: mod_base = OTHER; note = uridine-3'-phosphate
  modified_base 12: mod_base = OTHER; note = guanosine-3'-phosphate
  modified_base 13: mod_base = OTHER; note = cytidine-3'-phosphate
  modified_base 14: mod_base = OTHER; note = guanosine-3'-phosphate
  modified_base 15: mod_base = OTHER; note = uridine-3'-phosphate
  modified_base 16: mod_base = OTHER; note = uridine-3'-phosphate
  modified_base 17: mod_base = OTHER; note = 2'-O-methylcytidine-3'-phosphate
  modified_base 18: mod_base = OTHER; note = adenosine-3'-phosphate
  modified_base 19: mod_base = OTHER; note = guanosine-3'-phosphate
  modified_base 20: mod_base = OTHER; note = 2'-deoxythymidine-3'-phosphorothioate
  misc_feature 1..19: note = RNA
  misc_feature 20..21: note = DNA
tgacagtaaatgcgttcagtt

SEQ ID NO: 513 - DNA, 21 bp, synthetic construct
  source 1..21: mol_type = other DNA
  modified_base 1: mod_base = OTHER; note = 2'-O-methylcytidine-3'-phosphate
  modified_base 2: mod_base = OTHER; note = adenosine-3'-phosphate
  modified_base 3: mod_base = OTHER; note = adenosine-3'-phosphate
  modified_base 4: mod_base = OTHER; note = guanosine-3'-phosphate
  modified_base 5: mod_base = OTHER; note = guanosine-3'-phosphate
  modified_base 6: mod_base = OTHER; note = adenosine-3'-phosphate
  modified_base 7: mod_base = OTHER; note = 2'-O-methylcytidine-3'-phosphate
  modified_base 8: mod_base = OTHER; note = 2'-O-methylcytidine-3'-phosphate
  modified_base 9: mod_base = OTHER; note = 2'-O-methyluridine-3'-phosphate
  modified_base 10: mod_base = OTHER; note = adenosine-3'-phosphate
  modified_base 11: mod_base = OTHER; note = 2'-O-methyluridine-3'-phosphate
  modified_base 12: mod_base = OTHER; note = adenosine-3'-phosphate
  modified_base 13: mod_base = OTHER; note = 2'-O-methyluridine-3'-phosphate
  modified_base 14: mod_base = OTHER; note = guanosine-3'-phosphate
  modified_base 15: mod_base = OTHER; note = 2'-O-methyluridine-3'-phosphate
  modified_base 16: mod_base = OTHER; note = guanosine-3'-phosphate
  modified_base 17: mod_base = OTHER; note = guanosine-3'-phosphate
  modified_base 18: mod_base = OTHER; note = 2'-O-methyluridine-3'-phosphate
  modified_base 19: mod_base = OTHER; note = adenosine-3'-phosphate
  modified_base 20: mod_base = OTHER; note = 2'-deoxythymidine-3'-phosphorothioate
  misc_feature 1..19: note = RNA
  misc_feature 20..21: note = DNA
caaggacctatatgtggtatt

SEQ ID NO: 514 - DNA, 21 bp, synthetic construct
  source 1..21: mol_type = other DNA
  modified_base 1: mod_base = OTHER; note = 2'-O-methyluridine-3'-phosphate
  modified_base 2: mod_base = OTHER; note = adenosine-3'-phosphate
  modified_base 3: mod_base = OTHER; note = cytidine-3'-phosphate
  modified_base 4: mod_base = OTHER; note = 2'-O-methylcytidine-3'-phosphate
  modified_base 5: mod_base = OTHER; note = adenosine-3'-phosphate
  modified_base 6: mod_base = OTHER; note = 2'-O-methylcytidine-3'-phosphate
  modified_base 7: mod_base = OTHER; note = adenosine-3'-phosphate
  modified_base 8: mod_base = OTHER; note = 2'-O-methyluridine-3'-phosphate
  modified_base 9: mod_base = OTHER; note = adenosine-3'-phosphate
  modified_base 10: mod_base = OTHER; note = 2'-O-methyluridine-3'-phosphate
  modified_base 11: mod_base = OTHER; note = adenosine-3'-phosphate
  modified_base 12: mod_base = OTHER; note = guanosine-3'-phosphate
  modified_base 13: mod_base = OTHER; note = guanosine-3'-phosphate
  modified_base 14: mod_base = OTHER; note = uridine-3'-phosphate
  modified_base 15: mod_base = OTHER; note = cytidine-3'-phosphate
  modified_base 16: mod_base = OTHER; note = cytidine-3'-phosphate
  modified_base 17: mod_base = OTHER; note = uridine-3'-phosphate
  modified_base 18: mod_base = OTHER; note = uridine-3'-phosphate
  modified_base 19: mod_base = OTHER; note = guanosine-3'-phosphate
  modified_base 20: mod_base = OTHER; note = 2'-deoxythymidine-3'-phosphorothioate
  misc_feature 1..19: note = RNA
  misc_feature 20..21: note = DNA
taccacatataggtccttgtt

SEQ ID NO: 515 - DNA, 21 bp, synthetic construct
  source 1..21: mol_type = other DNA
  modified_base 1: mod_base = OTHER; note = guanosine-3'-phosphate
  modified_base 2: mod_base = OTHER; note = adenosine-3'-phosphate
  modified_base 3: mod_base = OTHER; note = guanosine-3'-phosphate
  modified_base 4: mod_base = OTHER; note = adenosine-3'-phosphate
  modified_base 5: mod_base = OTHER; note = 2'-O-methylcytidine-3'-phosphate
  modified_base 6: mod_base = OTHER; note = 2'-O-methylcytidine-3'-phosphate
  modified_base 7: mod_base = OTHER; note = 2'-O-methyluridine-3'-phosphate
  modified_base 8: mod_base = OTHER; note = 2'-O-methyluridine-3'-phosphate
  modified_base 9: mod_base = OTHER; note = guanosine-3'-phosphate
  modified_base 10: mod_base = OTHER; note = adenosine-3'-phosphate
  modified_base 11: mod_base = OTHER; note = 2'-O-methyluridine-3'-phosphate
  modified_base 12: mod_base = OTHER; note = adenosine-3'-phosphate
  modified_base 13: mod_base = OTHER; note = 2'-O-methylcytidine-3'-phosphate
  modified_base 14: mod_base = OTHER; note = 2'-O-methyluridine-3'-phosphate
  modified_base 15: mod_base = OTHER; note = 2'-O-methyluridine-3'-phosphate
  modified_base 16: mod_base = OTHER; note = 2'-O-methyluridine-3'-phosphate
  modified_base 17: mod_base = OTHER; note = 2'-O-methylcytidine-3'-phosphate
  modified_base 18: mod_base = OTHER; note = adenosine-3'-phosphate
  modified_base 19: mod_base = OTHER; note = adenosine-3'-phosphate
  modified_base 20: mod_base = OTHER; note = 2'-deoxythymidine-3'-phosphorothioate
  misc_feature 1..19: note = RNA
  misc_feature 20..21: note = DNA
gagaccttgatactttcaatt

SEQ ID NO: 516 - DNA, 21 bp, synthetic construct
  source 1..21: mol_type = other DNA
  modified_base 1: mod_base = OTHER; note = uridine-3'-phosphate
  modified_base 2: mod_base = OTHER; note = uridine-3'-phosphate
  modified_base 3: mod_base = OTHER; note = guanosine-3'-phosphate
  modified_base 4: mod_base = OTHER; note = adenosine-3'-phosphate
  modified_base 5: mod_base = OTHER; note = adenosine-3'-phosphate
  modified_base 6: mod_base = OTHER; note = adenosine-3'-phosphate
  modified_base 7: mod_base = OTHER; note = guanosine-3'-phosphate
  modified_base 8: mod_base = OTHER; note = 2'-O-methyluridine-3'-phosphate
  modified_base 9: mod_base = OTHER; note = adenosine-3'-phosphate
  modified_base 10: mod_base = OTHER; note = uridine-3'-phosphate
  modified_base 11: mod_base = OTHER; note = 2'-O-methylcytidine-3'-phosphate
  modified_base 12: mod_base = OTHER; note = adenosine-3'-phosphate
  modified_base 13: mod_base = OTHER; note = adenosine-3'-phosphate
  modified_base 14: mod_base = OTHER; note = guanosine-3'-phosphate
  modified_base 15: mod_base = OTHER; note = guanosine-3'-phosphate
  modified_base 16: mod_base = OTHER; note = uridine-3'-phosphate
  modified_base 17: mod_base = OTHER; note = cytidine-3'-phosphate
  modified_base 18: mod_base = OTHER; note = uridine-3'-phosphate
  modified_base 19: mod_base = OTHER; note = cytidine-3'-phosphate
  modified_base 20: mod_base = OTHER; note = 2'-deoxythymidine-3'-phosphorothioate
  misc_feature 1..19: note = RNA
  misc_feature 20..21: note = DNA
ttgaaagtatcaaggtctctt

SEQ ID NO: 517 - DNA, 21 bp, synthetic construct
  source 1..21: mol_type = other DNA
  modified_base 1: mod_base = OTHER; note = guanosine-3'-phosphate
  modified_base 2: mod_base = OTHER; note = guanosine-3'-phosphate
  modified_base 3: mod_base = OTHER; note = guanosine-3'-phosphate
  modified_base 4: mod_base = OTHER; note = 2'-O-methylcytidine-3'-phosphate
  modified_base 5: mod_base = OTHER; note = 2'-O-methyluridine-3'-phosphate
  modified_base 6: mod_base = OTHER; note = guanosine-3'-phosphate
  modified_base 7: mod_base = OTHER; note = adenosine-3'-phosphate
  modified_base 8: mod_base = OTHER; note = guanosine-3'-phosphate
  modified_base 9: mod_base = OTHER; note = 2'-O-methylcytidine-3'-phosphate
  modified_base 10: mod_base = OTHER; note = guanosine-3'-phosphate
  modified_base 11: mod_base = OTHER; note = 2'-O-methyluridine-3'-phosphate
  modified_base 12: mod_base = OTHER; note = guanosine-3'-phosphate
  modified_base 13: mod_base = OTHER; note = adenosine-3'-phosphate
  modified_base 14: mod_base = OTHER; note = 2'-O-methylcytidine-3'-phosphate
  modified_base 15: mod_base = OTHER; note = adenosine-3'-phosphate
  modified_base 16: mod_base = OTHER; note = adenosine-3'-phosphate
  modified_base 17: mod_base = OTHER; note = guanosine-3'-phosphate
  modified_base 18: mod_base = OTHER; note = adenosine-3'-phosphate
  modified_base 19: mod_base = OTHER; note = guanosine-3'-phosphate
  modified_base 20: mod_base = OTHER; note = 2'-deoxythymidine-3'-phosphorothioate
  misc_feature 1..19: note = RNA
  misc_feature 20..21: note = DNA
gggctgagcgtgacaagagtt

SEQ ID NO: 518 - DNA, 21 bp, synthetic construct
  source 1..21: mol_type = other DNA
  modified_base 1: mod_base = OTHER; note = cytidine-3'-phosphate
  modified_base 2: mod_base = OTHER; note = uridine-3'-phosphate
  modified_base 3: mod_base = OTHER; note = cytidine-3'-phosphate
  modified_base 4: mod_base = OTHER; note = uridine-3'-phosphate
  modified_base 5: mod_base = OTHER; note = uridine-3'-phosphate
  modified_base 6: mod_base = OTHER; note = guanosine-3'-phosphate
  modified_base 7: mod_base = OTHER; note = uridine-3'-phosphate
  modified_base 8: mod_base = OTHER; note = 2'-O-methylcytidine-3'-phosphate
  modified_base 9: mod_base = OTHER; note = adenosine-3'-phosphate
  modified_base 10: mod_base = OTHER; note = cytidine-3'-phosphate
  modified_base 11: mod_base = OTHER; note = guanosine-3'-phosphate
  modified_base 12: mod_base = OTHER; note = cytidine-3'-phosphate
  modified_base 13: mod_base = OTHER; note = uridine-3'-phosphate
  modified_base 14: mod_base = OTHER; note = 2'-O-methylcytidine-3'-phosphate
  modified_base 15: mod_base = OTHER; note = adenosine-3'-phosphate
  modified_base 16: mod_base = OTHER; note = guanosine-3'-phosphate
  modified_base 17: mod_base = OTHER; note = cytidine-3'-phosphate
  modified_base 18: mod_base = OTHER; note = cytidine-3'-phosphate
  modified_base 19: mod_base = OTHER; note = cytidine-3'-phosphate
  modified_base 20: mod_base = OTHER; note = 2'-deoxythymidine-3'-phosphorothioate
  misc_feature 1..19: note = RNA
  misc_feature 20..21: note = DNA
ctcttgtcacgctcagccctt

SEQ ID NO: 519 - DNA, 21 bp, synthetic construct
  source 1..21: mol_type = other DNA
  modified_base 1: mod_base = OTHER; note = 2'-O-methyluridine-3'-phosphate
  modified_base 2: mod_base = OTHER; note = adenosine-3'-phosphate
  modified_base 3: mod_base = OTHER; note = 2'-O-methyluridine-3'-phosphate
  modified_base 4: mod_base = OTHER; note = guanosine-3'-phosphate
  modified_base 5: mod_base = OTHER; note = guanosine-3'-phosphate
  modified_base 6: mod_base = OTHER; note = 2'-O-methyluridine-3'-phosphate
  modified_base 7: mod_base = OTHER; note = guanosine-3'-phosphate
  modified_base 8: mod_base = OTHER; note = guanosine-3'-phosphate
  modified_base 9: mod_base = OTHER; note = 2'-O-methyluridine-3'-phosphate
  modified_base 10: mod_base = OTHER; note = guanosine-3'-phosphate
  modified_base 11: mod_base = OTHER; note = 2'-O-methylcytidine-3'-phosphate
  modified_base 12: mod_base = OTHER; note = 2'-O-methylcytidine-3'-phosphate
  modified_base 13: mod_base = OTHER; note = guanosine-3'-phosphate
  modified_base 14: mod_base = OTHER; note = adenosine-3'-phosphate
  modified_base 15: mod_base = OTHER; note = 2'-O-methylcytidine-3'-phosphate
  modified_base 16: mod_base = OTHER; note = 2'-O-methyluridine-3'-phosphate
  modified_base 17: mod_base = OTHER; note = adenosine-3'-phosphate
  modified_base 18: mod_base = OTHER; note = 2'-O-methylcytidine-3'-phosphate
  modified_base 19: mod_base = OTHER; note = adenosine-3'-phosphate
  modified_base 20: mod_base = OTHER; note = 2'-deoxythymidine-3'-phosphorothioate
  misc_feature 1..19: note = RNA
  misc_feature 20..21: note = DNA
tatggtggtgccgactacatt

SEQ ID NO: 520 - DNA, 21 bp, synthetic construct
  source 1..21: mol_type = other DNA
  modified_base 1: mod_base = OTHER; note = uridine-3'-phosphate
  modified_base 2: mod_base = OTHER; note = guanosine-3'-phosphate
  modified_base 3: mod_base = OTHER; note = 2'-O-methyluridine-3'-phosphate
  modified_base 4: mod_base = OTHER; note = adenosine-3'-phosphate
  modified_base 5: mod_base = OTHER; note = guanosine-3'-phosphate
  modified_base 6: mod_base = OTHER; note = uridine-3'-phosphate
  modified_base 7: mod_base = OTHER; note = cytidine-3'-phosphate
  modified_base 8: mod_base = OTHER; note = guanosine-3'-phosphate
  modified_base 9: mod_base = OTHER; note = guanosine-3'-phosphate
  modified_base 10: mod_base = OTHER; note = 2'-O-methylcytidine-3'-phosphate
  modified_base 11: mod_base = OTHER; note = adenosine-3'-phosphate
  modified_base 12: mod_base = OTHER; note = cytidine-3'-phosphate
  modified_base 13: mod_base = OTHER; note = 2'-O-methylcytidine-3'-phosphate
  modified_base 14: mod_base = OTHER; note = adenosine-3'-phosphate
  modified_base 15: mod_base = OTHER; note = cytidine-3'-phosphate
  modified_base 16: mod_base = OTHER; note = 2'-O-methylcytidine-3'-phosphate
  modified_base 17: mod_base = OTHER; note = adenosine-3'-phosphate
  modified_base 18: mod_base = OTHER; note = 2'-O-methyluridine-3'-phosphate
  modified_base 19: mod_base = OTHER; note = adenosine-3'-phosphate
  modified_base 20: mod_base = OTHER; note = 2'-deoxythymidine-3'-phosphorothioate
  misc_feature 1..19: note = RNA
  misc_feature 20..21: note = DNA
tgtagtcggcaccaccatatt

SEQ ID NO: 521 - DNA, 21 bp, synthetic construct
  source 1..21: mol_type = other DNA
  modified_base 1: mod_base = OTHER; note = adenosine-3'-phosphate
  modified_base 2: mod_base = OTHER; note = adenosine-3'-phosphate
  modified_base 3: mod_base = OTHER; note = guanosine-3'-phosphate
  modified_base 4: mod_base = OTHER; note = guanosine-3'-phosphate
  modified_base 5: mod_base = OTHER; note = 2'-O-methyluridine-3'-phosphate
  modified_base 6: mod_base = OTHER; note = 2'-O-methyluridine-3'-phosphate
  modified_base 7: mod_base = OTHER; note = 2'-O-methylcytidine-3'-phosphate
  modified_base 8: mod_base = OTHER; note = adenosine-3'-phosphate
  modified_base 9: mod_base = OTHER; note = guanosine-3'-phosphate
  modified_base 10: mod_base = OTHER; note = 2'-O-methylcytidine-3'-phosphate
  modified_base 11: mod_base = OTHER; note = adenosine-3'-phosphate
  modified_base 12: mod_base = OTHER; note = 2'-O-methyluridine-3'-phosphate
  modified_base 13: mod_base = OTHER; note = adenosine-3'-phosphate
  modified_base 14: mod_base = OTHER; note = guanosine-3'-phosphate
  modified_base 15: mod_base = OTHER; note = 2'-O-methyluridine-3'-phosphate
  modified_base 16: mod_base = OTHER; note = adenosine-3'-phosphate
  modified_base 17: mod_base = OTHER; note = guanosine-3'-phosphate
  modified_base 18: mod_base = OTHER; note = 2'-O-methylcytidine-3'-phosphate
  modified_base 19: mod_base = OTHER; note = 2'-O-methyluridine-3'-phosphate
  modified_base 20: mod_base = OTHER; note = 2'-deoxythymidine-3'-phosphorothioate
  misc_feature 1..19: note = RNA
  misc_feature 20..21: note = DNA
aaggttcagcatagtagcttt

SEQ ID NO: 522 - DNA, 21 bp, synthetic construct
  source 1..21: mol_type = other DNA
  modified_base 1: mod_base = OTHER; note = adenosine-3'-phosphate
  modified_base 2: mod_base = OTHER; note = guanosine-3'-phosphate
  modified_base 3: mod_base = OTHER; note = cytidine-3'-phosphate
  modified_base 4: mod_base = OTHER; note = 2'-O-methyluridine-3'-phosphate
  modified_base 5: mod_base = OTHER; note = adenosine-3'-phosphate
  modified_base 6: mod_base = OTHER; note = cytidine-3'-phosphate
  modified_base 7: mod_base = OTHER; note = 2'-O-methyluridine-3'-phosphate
  modified_base 8: mod_base = OTHER; note = adenosine-3'-phosphate
  modified_base 9: mod_base = OTHER; note = uridine-3'-phosphate
  modified_base 10: mod_base = OTHER; note = guanosine-3'-phosphate
  modified_base 11: mod_base = OTHER; note = cytidine-3'-phosphate
  modified_base 12: mod_base = OTHER; note = uridine-3'-phosphate
  modified_base 13: mod_base = OTHER; note = guanosine-3'-phosphate
  modified_base 14: mod_base = OTHER; note = adenosine-3'-phosphate
  modified_base 15: mod_base = OTHER; note = adenosine-3'-phosphate
  modified_base 16: mod_base = OTHER; note = cytidine-3'-phosphate
  modified_base 17: mod_base = OTHER; note = cytidine-3'-phosphate
  modified_base 18: mod_base = OTHER; note = uridine-3'-phosphate
  modified_base 19: mod_base = OTHER; note = uridine-3'-phosphate
  modified_base 20: mod_base = OTHER; note = 2'-deoxythymidine-3'-phosphorothioate
  misc_feature 1..19: note = RNA
  misc_feature 20..21: note = DNA
agctactatgctgaacctttt

SEQ ID NO: 523 - DNA, 21 bp, synthetic construct
  source 1..21: mol_type = other DNA
  modified_base 1: mod_base = OTHER; note = adenosine-3'-phosphate
  modified_base 2: mod_base = OTHER; note = 2'-O-methyluridine-3'-phosphate
  modified_base 3: mod_base = OTHER; note = 2'-O-methylcytidine-3'-phosphate
  modified_base 4: mod_base = OTHER; note = 2'-O-methylcytidine-3'-phosphate
  modified_base 5: mod_base = OTHER; note = 2'-O-methyluridine-3'-phosphate
  modified_base 6: mod_base = OTHER; note = adenosine-3'-phosphate
  modified_base 7: mod_base = OTHER; note = guanosine-3'-phosphate
  modified_base 8: mod_base = OTHER; note = guanosine-3'-phosphate
  modified_base 9: mod_base = OTHER; note = adenosine-3'-phosphate
  modified_base 10: mod_base = OTHER; note = adenosine-3'-phosphate
  modified_base 11: mod_base = OTHER; note = guanosine-3'-phosphate
  modified_base 12: mod_base = OTHER; note = adenosine-3'-phosphate
  modified_base 13: mod_base = OTHER; note = 2'-O-methylcytidine-3'-phosphate
  modified_base 14: mod_base = OTHER; note = guanosine-3'-phosphate
  modified_base 15: mod_base = OTHER; note = guanosine-3'-phosphate
  modified_base 16: mod_base = OTHER; note = guanosine-3'-phosphate
  modified_base 17: mod_base = OTHER; note = 2'-O-methyluridine-3'-phosphate
  modified_base 18: mod_base = OTHER; note = 2'-O-methyluridine-3'-phosphate
  modified_base 19: mod_base = OTHER; note = guanosine-3'-phosphate
  modified_base 20: mod_base = OTHER; note = 2'-deoxythymidine-3'-phosphorothioate
  misc_feature 1..19: note = RNA
  misc_feature 20..21: note = DNA
atcctaggaagacgggttgtt

SEQ ID NO: 524 - DNA, 21 bp, synthetic construct
  source 1..21: mol_type = other DNA
  modified_base 1: mod_base = OTHER; note = 2'-O-methylcytidine-3'-phosphate
  modified_base 2: mod_base = OTHER; note = adenosine-3'-phosphate
  modified_base 3: mod_base = OTHER; note = adenosine-3'-phosphate
  modified_base 4: mod_base = OTHER; note = cytidine-3'-phosphate
  modified_base 5: mod_base = OTHER; note = cytidine-3'-phosphate
  modified_base 6: mod_base = OTHER; note = cytidine-3'-phosphate
  modified_base 7: mod_base = OTHER; note = guanosine-3'-phosphate
  modified_base 8: mod_base = OTHER; note = uridine-3'-phosphate
  modified_base 9: mod_base = OTHER; note = cytidine-3'-phosphate
  modified_base 10: mod_base = OTHER; note = uridine-3'-phosphate
  modified_base 11: mod_base = OTHER; note = uridine-3'-phosphate
  modified_base 12: mod_base = OTHER; note = cytidine-3'-phosphate
  modified_base 13: mod_base = OTHER; note = cytidine-3'-phosphate
  modified_base 14: mod_base = OTHER; note = 2'-O-methyluridine-3'-phosphate
  modified_base 15: mod_base = OTHER; note = adenosine-3'-phosphate
  modified_base 16: mod_base = OTHER; note = guanosine-3'-phosphate
  modified_base 17: mod_base = OTHER; note = guanosine-3'-phosphate
  modified_base 18: mod_base = OTHER; note = adenosine-3'-phosphate
  modified_base 19: mod_base = OTHER; note = uridine-3'-phosphate
  modified_base 20: mod_base = OTHER; note = 2'-deoxythymidine-3'-phosphorothioate
  misc_feature 1..19: note = RNA
  misc_feature 20..21: note = DNA
caacccgtcttcctaggattt

SEQ ID NO: 525 - DNA, 21 bp, synthetic construct
  source 1..21: mol_type = other DNA
  modified_base 1: mod_base = OTHER; note = adenosine-3'-phosphate
  modified_base 2: mod_base = OTHER; note = 2'-O-methyluridine-3'-phosphate
  modified_base 3: mod_base = OTHER; note = guanosine-3'-phosphate
  modified_base 4: mod_base = OTHER; note = 2'-O-methyluridine-3'-phosphate
  modified_base 5: mod_base = OTHER; note = 2'-O-methyluridine-3'-phosphate
  modified_base 6: mod_base = OTHER; note = adenosine-3'-phosphate
  modified_base 7: mod_base = OTHER; note = 2'-O-methylcytidine-3'-phosphate
  modified_base 8: mod_base = OTHER; note = adenosine-3'-phosphate
  modified_base 9: mod_base = OTHER; note = adenosine-3'-phosphate
  modified_base 10: mod_base = OTHER; note = 2'-O-methyluridine-3'-phosphate
  modified_base 11: mod_base = OTHER; note = 2'-O-methyluridine-3'-phosphate
  modified_base 12: mod_base = OTHER; note = 2'-O-methyluridine-3'-phosphate
  modified_base 13: mod_base = OTHER; note = 2'-O-methyluridine-3'-phosphate
  modified_base 14: mod_base = OTHER; note = guanosine-3'-phosphate
  modified_base 15: mod_base = OTHER; note = 2'-O-methyluridine-3'-phosphate
  modified_base 16: mod_base = OTHER; note = 2'-O-methylcytidine-3'-phosphate
  modified_base 17: mod_base = OTHER; note = guanosine-3'-phosphate
  modified_base 18: mod_base = OTHER; note = 2'-O-methylcytidine-3'-phosphate
  modified_base 19: mod_base = OTHER; note = 2'-O-methylcytidine-3'-phosphate
  modified_base 20: mod_base = OTHER; note = 2'-deoxythymidine-3'-phosphorothioate
  misc_feature 1..19: note = RNA
  misc_feature 20..21: note = DNA
atgttacaattttgtcgcctt

SEQ ID NO: 526 - DNA, 21 bp, synthetic construct
  source 1..21: mol_type = other DNA
  modified_base 1: mod_base = OTHER; note = guanosine-3'-phosphate
  modified_base 2: mod_base = OTHER; note = guanosine-3'-phosphate
  modified_base 3: mod_base = OTHER; note = cytidine-3'-phosphate
  modified_base 4: mod_base = OTHER; note = guanosine-3'-phosphate
  modified_base 5: mod_base = OTHER; note = adenosine-3'-phosphate
  modified_base 6: mod_base = OTHER; note = 2'-O-methylcytidine-3'-phosphate
  modified_base 7: mod_base = OTHER; note = adenosine-3'-phosphate
  modified_base 8: mod_base = OTHER; note = adenosine-3'-phosphate
  modified_base 9: mod_base = OTHER; note = adenosine-3'-phosphate
  modified_base 10: mod_base = OTHER; note = adenosine-3'-phosphate
  modified_base 11: mod_base = OTHER; note = uridine-3'-phosphate
  modified_base 12: mod_base = OTHER; note = uridine-3'-phosphate
  modified_base 13: mod_base = OTHER; note = guanosine-3'-phosphate
  modified_base 14: mod_base = OTHER; note = 2'-O-methyluridine-3'-phosphate
  modified_base 15: mod_base = OTHER; note = adenosine-3'-phosphate
  modified_base 16: mod_base = OTHER; note = adenosine-3'-phosphate
  modified_base 17: mod_base = OTHER; note = 2'-O-methylcytidine-3'-phosphate
  modified_base 18: mod_base = OTHER; note = adenosine-3'-phosphate
  modified_base 19: mod_base = OTHER; note = uridine-3'-phosphate
  modified_base 20: mod_base = OTHER; note = 2'-deoxythymidine-3'-phosphorothioate
  misc_feature 1..19: note = RNA
  misc_feature 20..21: note = DNA
ggcgacaaaattgtaacattt

SEQ ID NO: 527 - DNA, 21 bp, synthetic construct
  source 1..21: mol_type = other DNA
  modified_base 1: mod_base = OTHER; note = adenosine-3'-phosphate
  modified_base 2: mod_base = OTHER; note = 2'-O-methyluridine-3'-phosphate
  modified_base 3: mod_base = OTHER; note = 2'-O-methyluridine-3'-phosphate
  modified_base 4: mod_base = OTHER; note = 2'-O-methyluridine-3'-phosphate
  modified_base 5: mod_base = OTHER; note = adenosine-3'-phosphate
  modified_base 6: mod_base = OTHER; note = 2'-O-methylcytidine-3'-phosphate
  modified_base 7: mod_base = OTHER; note = 2'-O-methyluridine-3'-phosphate
  modified_base 8: mod_base = OTHER; note = guanosine-3'-phosphate
  modified_base 9: mod_base = OTHER; note = 2'-O-methyluridine-3'-phosphate
  modified_base 10: mod_base = OTHER; note = 2'-O-methylcytidine-3'-phosphate
  modified_base 11: mod_base = OTHER; note = adenosine-3'-phosphate
  modified_base 12: mod_base = OTHER; note = 2'-O-methylcytidine-3'-phosphate
  modified_base 13: mod_base = OTHER; note = guanosine-3'-phosphate
  modified_base 14: mod_base = OTHER; note = guanosine-3'-phosphate
  modified_base 15: mod_base = OTHER; note = 2'-O-methyluridine-3'-phosphate
  modified_base 16: mod_base = OTHER; note = 2'-O-methyluridine-3'-phosphate
  modified_base 17: mod_base = OTHER; note = 2'-O-methylcytidine-3'-phosphate
  modified_base 18: mod_base = OTHER; note = 2'-O-methylcytidine-3'-phosphate
  modified_base 19: mod_base = OTHER; note = 2'-O-methylcytidine-3'-phosphate
  modified_base 20: mod_base = OTHER; note = 2'-deoxythymidine-3'-phosphorothioate
  misc_feature 1..19: note = RNA
  misc_feature 20..21: note = DNA
atttactgtcacggttccctt

SEQ ID NO: 528 - DNA, 21 bp, synthetic construct
  source 1..21: mol_type = other DNA
  modified_base 1: mod_base = OTHER; note = guanosine-3'-phosphate
  modified_base 2: mod_base = OTHER; note = guanosine-3'-phosphate
  modified_base 3: mod_base = OTHER; note = guanosine-3'-phosphate
  modified_base 4: mod_base = OTHER; note = adenosine-3'-phosphate
  modified_base 5: mod_base = OTHER; note = adenosine-3'-phosphate
  modified_base 6: mod_base = OTHER; note = cytidine-3'-phosphate
  modified_base 7: mod_base = OTHER; note = cytidine-3'-phosphate
  modified_base 8: mod_base = OTHER; note = guanosine-3'-phosphate
  modified_base 9: mod_base = OTHER; note = uridine-3'-phosphate
  modified_base 10: mod_base = OTHER; note = guanosine-3'-phosphate
  modified_base 11: mod_base = OTHER; note = adenosine-3'-phosphate
  modified_base 12: mod_base = OTHER; note = 2'-O-methylcytidine-3'-phosphate
  modified_base 13: mod_base = OTHER; note = adenosine-3'-phosphate
  modified_base 14: mod_base = OTHER; note = guanosine-3'-phosphate
  modified_base 15: mod_base = OTHER; note = 2'-O-methyluridine-3'-phosphate
  modified_base 16: mod_base = OTHER; note = adenosine-3'-phosphate
  modified_base 17: mod_base = OTHER; note = adenosine-3'-phosphate
  modified_base 18: mod_base = OTHER; note = adenosine-3'-phosphate
  modified_base 19: mod_base = OTHER; note = uridine-3'-phosphate
  modified_base 20: mod_base = OTHER; note = 2'-deoxythymidine-3'-phosphorothioate
  misc_feature 1..19: note = RNA
  misc_feature 20..21: note = DNA
gggaaccgtgacagtaaattt

SEQ ID NO: 529 - DNA, 21 bp, synthetic construct
  source 1..21: mol_type = other DNA
  modified_base 1: mod_base = OTHER; note = 2'-O-methylcytidine-3'-phosphate
  modified_base 2: mod_base = OTHER; note = guanosine-3'-phosphate
  modified_base 3: mod_base = OTHER; note = 2'-O-methylcytidine-3'-phosphate
  modified_base 4: mod_base = OTHER; note = adenosine-3'-phosphate
  modified_base 5: mod_base = OTHER; note = 2'-O-methyluridine-3'-phosphate
  modified_base 6: mod_base = OTHER; note = 2'-O-methyluridine-3'-phosphate
  modified_base 7: mod_base = OTHER; note = 2'-O-methyluridine-3'-phosphate
  modified_base 8: mod_base = OTHER; note = adenosine-3'-phosphate
  modified_base 9: mod_base = OTHER; note = 2'-O-methylcytidine-3'-phosphate
  modified_base 10: mod_base = OTHER; note = 2'-O-methyluridine-3'-phosphate
  modified_base 11: mod_base = OTHER; note = guanosine-3'-phosphate
  modified_base 12: mod_base = OTHER; note = 2'-O-methyluridine-3'-phosphate
  modified_base 13: mod_base = OTHER; note = 2'-O-methylcytidine-3'-phosphate
  modified_base 14: mod_base = OTHER; note = adenosine-3'-phosphate
  modified_base 15: mod_base = OTHER; note = 2'-O-methylcytidine-3'-phosphate
  modified_base 16: mod_base = OTHER; note = guanosine-3'-phosphate
  modified_base 17: mod_base = OTHER; note = guanosine-3'-phosphate
  modified_base 18: mod_base = OTHER; note = 2'-O-methyluridine-3'-phosphate
  modified_base 19: mod_base = OTHER; note = 2'-O-methyluridine-3'-phosphate
  modified_base 20: mod_base = OTHER; note = 2'-deoxythymidine-3'-phosphorothioate
  misc_feature 1..19: note = RNA
  misc_feature 20..21: note = DNA
cgcatttactgtcacggtttt

SEQ ID NO: 530 - DNA, 21 bp, synthetic construct
  source 1..21: mol_type = other DNA
  modified_base 1: mod_base = OTHER; note = adenosine-3'-phosphate
  modified_base 2: mod_base = OTHER; note = adenosine-3'-phosphate
  modified_base 3: mod_base = OTHER; note = cytidine-3'-phosphate
  modified_base 4: mod_base = OTHER; note = cytidine-3'-phosphate
  modified_base 5: mod_base = OTHER; note = guanosine-3'-phosphate
  modified_base 6: mod_base = OTHER; note = uridine-3'-phosphate
  modified_base 7: mod_base = OTHER; note = guanosine-3'-phosphate
  modified_base 8: mod_base = OTHER; note = adenosine-3'-phosphate
  modified_base 9: mod_base = OTHER; note = 2'-O-methylcytidine-3'-phosphate
  modified_base 10: mod_base = OTHER; note = adenosine-3'-phosphate
  modified_base 11: mod_base = OTHER; note = guanosine-3'-phosphate
  modified_base 12: mod_base = OTHER; note = 2'-O-methyluridine-3'-phosphate
  modified_base 13: mod_base = OTHER; note = adenosine-3'-phosphate
  modified_base 14: mod_base = OTHER; note = adenosine-3'-phosphate
  modified_base 15: mod_base = OTHER; note = adenosine-3'-phosphate
  modified_base 16: mod_base = OTHER; note = uridine-3'-phosphate
  modified_base 17: mod_base = OTHER; note = guanosine-3'-phosphate
  modified_base 18: mod_base = OTHER; note = cytidine-3'-phosphate
  modified_base 19: mod_base = OTHER; note = guanosine-3'-phosphate
  modified_base 20: mod_base = OTHER; note = 2'-deoxythymidine-3'-phosphorothioate
  misc_feature 1..19: note = RNA
  misc_feature 20..21: note = DNA
aaccgtgacagtaaatgcgtt

SEQ ID NO: 531 - DNA, 21 bp, synthetic construct
  source 1..21: mol_type = other DNA
  modified_base 1: mod_base = OTHER; note = adenosine-3'-phosphate
  modified_base 2: mod_base = OTHER; note = guanosine-3'-phosphate
  modified_base 3: mod_base = OTHER; note = guanosine-3'-phosphate
  modified_base 4: mod_base = OTHER; note = 2'-O-methyluridine-3'-phosphate
  modified_base 5: mod_base = OTHER; note = 2'-O-methyluridine-3'-phosphate
  modified_base 6: mod_base = OTHER; note = 2'-O-methylcytidine-3'-phosphate
  modified_base 7: mod_base = OTHER; note = adenosine-3'-phosphate
  modified_base 8: mod_base = OTHER; note = guanosine-3'-phosphate
  modified_base 9: mod_base = OTHER; note = 2'-O-methylcytidine-3'-phosphate
  modified_base 10: mod_base = OTHER; note = adenosine-3'-phosphate
  modified_base 11: mod_base = OTHER; note = 2'-O-methyluridine-3'-phosphate
  modified_base 12: mod_base = OTHER; note = adenosine-3'-phosphate
  modified_base 13: mod_base = OTHER; note = guanosine-3'-phosphate
  modified_base 14: mod_base = OTHER; note = 2'-O-methyluridine-3'-phosphate
  modified_base 15: mod_base = OTHER; note = adenosine-3'-phosphate
  modified_base 16: mod_base = OTHER; note = guanosine-3'-phosphate
  modified_base 17: mod_base = OTHER; note = 2'-O-methylcytidine-3'-phosphate
  modified_base 18: mod_base = OTHER; note = 2'-O-methyluridine-3'-phosphate
  modified_base 19: mod_base = OTHER; note = adenosine-3'-phosphate
  modified_base 20: mod_base = OTHER; note = 2'-deoxythymidine-3'-phosphorothioate
  misc_feature 1..19: note = RNA
  misc_feature 20..21: note = DNA
aggttcagcatagtagctatt

SEQ ID NO: 532 - DNA, 21 bp, synthetic construct
  source 1..21: mol_type = other DNA
  modified_base 1: mod_base = OTHER; note = 2'-O-methyluridine-3'-phosphate
  modified_base 2: mod_base = OTHER; note = adenosine-3'-phosphate
  modified_base 3: mod_base = OTHER; note = guanosine-3'-phosphate
  modified_base 4: mod_base = OTHER; note = cytidine-3'-phosphate
  modified_base 5: mod_base = OTHER; note = 2'-O-methyluridine-3'-phosphate
  modified_base 6: mod_base = OTHER; note = adenosine-3'-phosphate
  modified_base 7: mod_base = OTHER; note = cytidine-3'-phosphate
  modified_base 8: mod_base = OTHER; note = 2'-O-methyluridine-3'-phosphate
  modified_base 9: mod_base = OTHER; note = adenosine-3'-phosphate
  modified_base 10: mod_base = OTHER; note = uridine-3'-phosphate
  modified_base 11: mod_base = OTHER; note = guanosine-3'-phosphate
  modified_base 12: mod_base = OTHER; note = cytidine-3'-phosphate
  modified_base 13: mod_base = OTHER; note = uridine-3'-phosphate
  modified_base 14: mod_base = OTHER; note = guanosine-3'-phosphate
  modified_base 15: mod_base = OTHER; note = adenosine-3'-phosphate
  modified_base 16: mod_base = OTHER; note = adenosine-3'-phosphate
  modified_base 17: mod_base = OTHER; note = cytidine-3'-phosphate
  modified_base 18: mod_base = OTHER; note = cytidine-3'-phosphate
  modified_base 19: mod_base = OTHER; note = uridine-3'-phosphate
  modified_base 20: mod_base = OTHER; note = 2'-deoxythymidine-3'-phosphorothioate
  misc_feature 1..19: note = RNA
  misc_feature 20..21: note = DNA
tagctactatgctgaaccttt

SEQ ID NO: 533 - DNA, 21 bp, synthetic construct
  source 1..21: mol_type = other DNA
  modified_base 1: mod_base = OTHER; note = 2'-O-methylcytidine-3'-phosphate
  modified_base 2: mod_base = OTHER; note = adenosine-3'-phosphate
  modified_base 3: mod_base = OTHER; note = 2'-O-methylcytidine-3'-phosphate
  modified_base 4: mod_base = OTHER; note = 2'-O-methylcytidine-3'-phosphate
  modified_base 5: mod_base = OTHER; note = adenosine-3'-phosphate
  modified_base 6: mod_base = OTHER; note = guanosine-3'-phosphate
  modified_base 7: mod_base = OTHER; note = 2'-O-methylcytidine-3'-phosphate
  modified_base 8: mod_base = OTHER; note = 2'-O-methylcytidine-3'-phosphate
  modified_base 9: mod_base = OTHER; note = guanosine-3'-phosphate
  modified_base 10: mod_base = OTHER; note = 2'-O-methylcytidine-3'-phosphate
  modified_base 11: mod_base = OTHER; note = guanosine-3'-phosphate
  modified_base 12: mod_base = OTHER; note = 2'-O-methylcytidine-3'-phosphate
  modified_base 13: mod_base = OTHER; note = 2'-O-methyluridine-3'-phosphate
  modified_base 14: mod_base = OTHER; note = 2'-O-methyluridine-3'-phosphate
  modified_base 15: mod_base = OTHER; note = 2'-O-methylcytidine-3'-phosphate
  modified_base 16: mod_base = OTHER; note = 2'-O-methyluridine-3'-phosphate
  modified_base 17: mod_base = OTHER; note = guanosine-3'-phosphate
  modified_base 18: mod_base = OTHER; note = 2'-O-methyluridine-3'-phosphate
  modified_base 19: mod_base = OTHER; note = 2'-O-methylcytidine-3'-phosphate
  modified_base 20: mod_base = OTHER; note = 2'-deoxythymidine-3'-phosphorothioate
  misc_feature 1..19: note = RNA
  misc_feature 20..21: note = DNA
caccagccgcgcttctgtctt

SEQ ID NO: 534 - DNA, 21 bp, synthetic construct
  source 1..21: mol_type = other DNA
  modified_base 1: mod_base = OTHER; note = guanosine-3'-phosphate
  modified_base 2: mod_base = OTHER; note = adenosine-3'-phosphate
  modified_base 3: mod_base = OTHER; note = 2'-O-methylcytidine-3'-phosphate
  modified_base 4: mod_base = OTHER; note = adenosine-3'-phosphate
  modified_base 5: mod_base = OTHER; note = guanosine-3'-phosphate
  modified_base 6: mod_base = OTHER; note = adenosine-3'-phosphate
  modified_base 7: mod_base = OTHER; note = adenosine-3'-phosphate
  modified_base 8: mod_base = OTHER; note = guanosine-3'-phosphate
  modified_base 9: mod_base = OTHER; note = cytidine-3'-phosphate
  modified_base 10: mod_base = OTHER; note = guanosine-3'-phosphate
  modified_base 11: mod_base = OTHER; note = cytidine-3'-phosphate
  modified_base 12: mod_base = OTHER; note = guanosine-3'-phosphate
  modified_base 13: mod_base = OTHER; note = guanosine-3'-phosphate
  modified_base 14: mod_base = OTHER; note = cytidine-3'-phosphate
  modified_base 15: mod_base = OTHER; note = uridine-3'-phosphate
  modified_base 16: mod_base = OTHER; note = guanosine-3'-phosphate
  modified_base 17: mod_base = OTHER; note = guanosine-3'-phosphate
  modified_base 18: mod_base = OTHER; note = uridine-3'-phosphate
  modified_base 19: mod_base = OTHER; note = guanosine-3'-phosphate
  modified_base 20: mod_base = OTHER; note = 2'-deoxythymidine-3'-phosphorothioate
  misc_feature 1..19: note = RNA
  misc_feature 20..21: note = DNA
gacagaagcgcggctggtgtt

SEQ ID NO: 535 - DNA, 21 bp, synthetic construct
  source 1..21: mol_type = other DNA
  modified_base 1: mod_base = OTHER; note = 2'-O-methylcytidine-3'-phosphate
  modified_base 2: mod_base = OTHER; note = guanosine-3'-phosphate
  modified_base 3: mod_base = OTHER; note = 2'-O-methylcytidine-3'-phosphate
  modified_base 4: mod_base = OTHER; note = guanosine-3'-phosphate
  modified_base 5: mod_base = OTHER; note = 2'-O-methylcytidine-3'-phosphate
  modified_base 6: mod_base = OTHER; note = 2'-O-methyluridine-3'-phosphate
  modified_base 7: mod_base = OTHER; note = 2'-O-methyluridine-3'-phosphate
  modified_base 8: mod_base = OTHER; note = 2'-O-methylcytidine-3'-phosphate
  modified_base 9: mod_base = OTHER; note = 2'-O-methyluridine-3'-phosphate
  modified_base 10: mod_base = OTHER; note = guanosine-3'-phosphate
  modified_base 11: mod_base = OTHER; note = 2'-O-methyluridine-3'-phosphate
  modified_base 12: mod_base = OTHER; note = 2'-O-methylcytidine-3'-phosphate
  modified_base 13: mod_base = OTHER; note = 2'-O-methylcytidine-3'-phosphate
  modified_base 14: mod_base = OTHER; note = guanosine-3'-phosphate
  modified_base 15: mod_base = OTHER; note = 2'-O-methylcytidine-3'-phosphate
  modified_base 16: mod_base = OTHER; note = 2'-O-methylcytidine-3'-phosphate
  modified_base 17: mod_base = OTHER; note = 2'-O-methyluridine-3'-phosphate
  modified_base 18: mod_base = OTHER; note = guanosine-3'-phosphate
  modified_base 19: mod_base = OTHER; note = 2'-O-methylcytidine-3'-phosphate
  modified_base 20: mod_base = OTHER; note = 2'-deoxythymidine-3'-phosphorothioate
  misc_feature 1..19: note = RNA
  misc_feature 20..21: note = DNA
cgcgcttctgtccgcctgctt

SEQ ID NO: 536 - DNA, 21 bp, synthetic construct
  source 1..21: mol_type = other DNA
  modified_base 1: mod_base = OTHER; note = guanosine-3'-phosphate
  modified_base 2: mod_base = OTHER; note = 2'-O-methylcytidine-3'-phosphate
  modified_base 3: mod_base = OTHER; note = adenosine-3'-phosphate
  modified_base 4: mod_base = OTHER; note = guanosine-3'-phosphate
  modified_base 5: mod_base = OTHER; note = guanosine-3'-phosphate
  modified_base 6: mod_base = OTHER; note = cytidine-3'-phosphate
  modified_base 7: mod_base = OTHER; note = guanosine-3'-phosphate
  modified_base 8: mod_base = OTHER; note = guanosine-3'-phosphate
  modified_base 9: mod_base = OTHER; note = adenosine-3'-phosphate
  modified_base 10: mod_base = OTHER; note = 2'-O-methylcytidine-3'-phosphate
  modified_base 11: mod_base = OTHER; note = adenosine-3'-phosphate
  modified_base 12: mod_base = OTHER; note = guanosine-3'-phosphate
  modified_base 13: mod_base = OTHER; note = adenosine-3'-phosphate
  modified_base 14: mod_base = OTHER; note = adenosine-3'-phosphate
  modified_base 15: mod_base = OTHER; note = guanosine-3'-phosphate
  modified_base 16: mod_base = OTHER; note = cytidine-3'-phosphate
  modified_base 17: mod_base = OTHER; note = guanosine-3'-phosphate
  modified_base 18: mod_base = OTHER; note = cytidine-3'-phosphate
  modified_base 19: mod_base = OTHER; note = guanosine-3'-phosphate
  modified_base 20: mod_base = OTHER; note = 2'-deoxythymidine-3'-phosphorothioate
  misc_feature 1..19: note = RNA
  misc_feature 20..21: note = DNA
gcaggcggacagaagcgcgtt

SEQ ID NO: 537 - DNA, 21 bp, synthetic construct
  source 1..21: mol_type = other DNA
  modified_base 1: mod_base = OTHER; note = adenosine-3'-phosphate
  modified_base 2: mod_base = OTHER; note = adenosine-3'-phosphate
  modified_base 3: mod_base = OTHER; note = guanosine-3'-phosphate
  modified_base 4: mod_base = OTHER; note = adenosine-3'-phosphate
  modified_base 5: mod_base = OTHER; note = 2'-O-methyluridine-3'-phosphate
  modified_base 6: mod_base = OTHER; note = guanosine-3'-phosphate
  modified_base 7: mod_base = OTHER; note = adenosine-3'-phosphate
  modified_base 8: mod_base = OTHER; note = guanosine-3'-phosphate
  modified_base 9: mod_base = OTHER; note = guanosine-3'-phosphate
  modified_base 10: mod_base = OTHER; note = adenosine-3'-phosphate
  modified_base 11: mod_base = OTHER; note = 2'-O-methyluridine-3'-phosphate
  modified_base 12: mod_base = OTHER; note = adenosine-3'-phosphate
  modified_base 13: mod_base = OTHER; note = 2'-O-methyluridine-3'-phosphate
  modified_base 14: mod_base = OTHER; note = 2'-O-methyluridine-3'-phosphate
  modified_base 15: mod_base = OTHER; note = 2'-O-methyluridine-3'-phosphate
  modified_base 16: mod_base = OTHER; note = guanosine-3'-phosphate
  modified_base 17: mod_base = OTHER; note = 2'-O-methylcytidine-3'-phosphate
  modified_base 18: mod_base = OTHER; note = 2'-O-methyluridine-3'-phosphate
  modified_base 19: mod_base = OTHER; note = guanosine-3'-phosphate
  modified_base 20: mod_base = OTHER; note = 2'-deoxythymidine-3'-phosphorothioate
  misc_feature 1..19: note = RNA
  misc_feature 20..21: note = DNA
aagatgaggatatttgctgtt

SEQ ID NO: 538 - DNA, 21 bp, synthetic construct
  source 1..21: mol_type = other DNA
  modified_base 1: mod_base = OTHER; note = 2'-O-methylcytidine-3'-phosphate
  modified_base 2: mod_base = OTHER; note = adenosine-3'-phosphate
  modified_base 3: mod_base = OTHER; note = guanosine-3'-phosphate
  modified_base 4: mod_base = OTHER; note = 2'-O-methylcytidine-3'-phosphate
  modified_base 5: mod_base = OTHER; note = adenosine-3'-phosphate
  modified_base 6: mod_base = OTHER; note = adenosine-3'-phosphate
  modified_base 7: mod_base = OTHER; note = adenosine-3'-phosphate
  modified_base 8: mod_base = OTHER; note = 2'-O-methyluridine-3'-phosphate
  modified_base 9: mod_base = OTHER; note = adenosine-3'-phosphate
  modified_base 10: mod_base = OTHER; note = uridine-3'-phosphate
  modified_base 11: mod_base = OTHER; note = cytidine-3'-phosphate
  modified_base 12: mod_base = OTHER; note = cytidine-3'-phosphate
  modified_base 13: mod_base = OTHER; note = uridine-3'-phosphate
  modified_base 14: mod_base = OTHER; note = 2'-O-methylcytidine-3'-phosphate
  modified_base 15: mod_base = OTHER; note = adenosine-3'-phosphate
  modified_base 16: mod_base = OTHER; note = uridine-3'-phosphate
  modified_base 17: mod_base = OTHER; note = cytidine-3'-phosphate
  modified_base 18: mod_base = OTHER; note = uridine-3'-phosphate
  modified_base 19: mod_base = OTHER; note = uridine-3'-phosphate
  modified_base 20: mod_base = OTHER; note = 2'-deoxythymidine-3'-phosphorothioate
  misc_feature 1..19: note = RNA
  misc_feature 20..21: note = DNA
cagcaaatatcctcatctttt

SEQ ID NO: 539 - DNA, 21 bp, synthetic construct
  source 1..21: mol_type = other DNA
  modified_base 1: mod_base = OTHER; note = 2'-O-methylcytidine-3'-phosphate
  modified_base 2: mod_base = OTHER; note = 2'-O-methyluridine-3'-phosphate
  modified_base 3: mod_base = OTHER; note = 2'-O-methyluridine-3'-phosphate
  modified_base 4: mod_base = OTHER; note = 2'-O-methyluridine-3'-phosphate
  modified_base 5: mod_base = OTHER; note = adenosine-3'-phosphate
  modified_base 6: mod_base = OTHER; note = 2'-O-methyluridine-3'-phosphate
  modified_base 7: mod_base = OTHER; note = adenosine-3'-phosphate
  modified_base 8: mod_base = OTHER; note = 2'-O-methyluridine-3'-phosphate
  modified_base 9: mod_base = OTHER; note = 2'-O-methyluridine-3'-phosphate
  modified_base 10: mod_base = OTHER; note = 2'-O-methylcytidine-3'-phosphate
  modified_base 11: mod_base = OTHER; note = adenosine-3'-phosphate
  modified_base 12: mod_base = OTHER; note = 2'-O-methyluridine-3'-phosphate
  modified_base 13: mod_base = OTHER; note = guanosine-3'-phosphate
  modified_base 14: mod_base = OTHER; note = adenosine-3'-phosphate
  modified_base 15: mod_base = OTHER; note = 2'-O-methylcytidine-3'-phosphate
  modified_base 16: mod_base = OTHER; note = 2'-O-methylcytidine-3'-phosphate
  modified_base 17: mod_base = OTHER; note = 2'-O-methyluridine-3'-phosphate
  modified_base 18: mod_base = OTHER; note = adenosine-3'-phosphate
  modified_base 19: mod_base = OTHER; note = 2'-O-methylcytidine-3'-phosphate
  modified_base 20: mod_base = OTHER; note = 2'-deoxythymidine-3'-phosphorothioate
  misc_feature 1..19: note = RNA
  misc_feature 20..21: note = DNA
ctttatattcatgacctactt

SEQ ID NO: 540 - DNA, 21 bp, synthetic construct
  source 1..21: mol_type = other DNA
  modified_base 1: mod_base = OTHER; note = guanosine-3'-phosphate
  modified_base 2: mod_base = OTHER; note = 2'-O-methyluridine-3'-phosphate
  modified_base 3: mod_base = OTHER; note = adenosine-3'-phosphate
  modified_base 4: mod_base = OTHER; note = guanosine-3'-phosphate
  modified_base 5: mod_base = OTHER; note = guanosine-3'-phosphate
  modified_base 6: mod_base = OTHER; note = uridine-3'-phosphate
  modified_base 7: mod_base = OTHER; note = 2'-O-methylcytidine-3'-phosphate
  modified_base 8: mod_base = OTHER; note = adenosine-3'-phosphate
  modified_base 9: mod_base = OTHER; note = uridine-3'-phosphate
  modified_base 10: mod_base = OTHER; note = guanosine-3'-phosphate
  modified_base 11: mod_base = OTHER; note = adenosine-3'-phosphate
  modified_base 12: mod_base = OTHER; note = adenosine-3'-phosphate
  modified_base 13: mod_base = OTHER; note = 2'-O-methyluridine-3'-phosphate
  modified_base 14: mod_base = OTHER; note = adenosine-3'-phosphate
  modified_base 15: mod_base = OTHER; note = 2'-O-methyluridine-3'-phosphate
  modified_base 16: mod_base = OTHER; note = adenosine-3'-phosphate
  modified_base 17: mod_base = OTHER; note = adenosine-3'-phosphate
  modified_base 18: mod_base = OTHER; note = adenosine-3'-phosphate
  modified_base 19: mod_base = OTHER; note = guanosine-3'-phosphate
  modified_base 20: mod_base = OTHER; note = 2'-deoxythymidine-3'-phosphorothioate
  misc_feature 1..19: note = RNA
  misc_feature 20..21: note = DNA
gtaggtcatgaatataaagtt

SEQ ID NO: 541 - DNA, 21 bp, synthetic construct
  source 1..21: mol_type = other DNA
  modified_base 1: mod_base = OTHER; note = adenosine-3'-phosphate
  modified_base 2: mod_base = OTHER; note = 2'-O-methyluridine-3'-phosphate
  modified_base 3: mod_base = OTHER; note = 2'-O-methyluridine-3'-phosphate
  modified_base 4: mod_base = OTHER; note = 2'-O-methylcytidine-3'-phosphate
  modified_base 5: mod_base = OTHER; note = adenosine-3'-phosphate
  modified_base 6: mod_base = OTHER; note = 2'-O-methyluridine-3'-phosphate
  modified_base 7: mod_base = OTHER; note = guanosine-3'-phosphate
  modified_base 8: mod_base = OTHER; note = adenosine-3'-phosphate
  modified_base 9: mod_base = OTHER; note = 2'-O-methylcytidine-3'-phosphate
  modified_base 10: mod_base = OTHER; note = 2'-O-methylcytidine-3'-phosphate
  modified_base 11: mod_base = OTHER; note = 2'-O-methyluridine-3'-phosphate
  modified_base 12: mod_base = OTHER; note = adenosine-3'-phosphate
  modified_base 13: mod_base = OTHER; note = 2'-O-methylcytidine-3'-phosphate
  modified_base 14: mod_base = OTHER; note = 2'-O-methyluridine-3'-phosphate
  modified_base 15: mod_base = OTHER; note = guanosine-3'-phosphate
  modified_base 16: mod_base = OTHER; note = guanosine-3'-phosphate
  modified_base 17: mod_base = OTHER; note = 2'-O-methylcytidine-3'-phosphate
  modified_base 18: mod_base = OTHER; note = adenosine-3'-phosphate
  modified_base 19: mod_base = OTHER; note = 2'-O-methyluridine-3'-phosphate
  modified_base 20: mod_base = OTHER; note = 2'-deoxythymidine-3'-phosphorothioate
  misc_feature 1..19: note = RNA
  misc_feature 20..21: note = DNA
attcatgacctactggcattt

SEQ ID NO: 542 - DNA, 21 bp, synthetic construct
  source 1..21: mol_type = other DNA
  modified_base 1: mod_base = OTHER; note = adenosine-3'-phosphate
  modified_base 2: mod_base = OTHER; note = uridine-3'-phosphate
  modified_base 3: mod_base = OTHER; note = guanosine-3'-phosphate
  modified_base 4: mod_base = OTHER; note = cytidine-3'-phosphate
  modified_base 5: mod_base = OTHER; note = 2'-O-methylcytidine-3'-phosphate
  modified_base 6: mod_base = OTHER; note = adenosine-3'-phosphate
  modified_base 7: mod_base = OTHER; note = guanosine-3'-phosphate
  modified_base 8: mod_base = OTHER; note = 2'-O-methyluridine-3'-phosphate
  modified_base 9: mod_base = OTHER; note = adenosine-3'-phosphate
  modified_base 10: mod_base = OTHER; note = guanosine-3'-phosphate
  modified_base 11: mod_base = OTHER; note = guanosine-3'-phosphate
  modified_base 12: mod_base = OTHER; note = uridine-3'-phosphate
  modified_base 13: mod_base = OTHER; note = 2'-O-methylcytidine-3'-phosphate
  modified_base 14: mod_base = OTHER; note = adenosine-3'-phosphate
  modified_base 15: mod_base = OTHER; note = uridine-3'-phosphate
  modified_base 16: mod_base = OTHER; note = guanosine-3'-phosphate
  modified_base 17: mod_base = OTHER; note = adenosine-3'-phosphate
  modified_base 18: mod_base = OTHER; note = adenosine-3'-phosphate
  modified_base 19: mod_base = OTHER; note = uridine-3'-phosphate
  modified_base 20: mod_base = OTHER; note = 2'-deoxythymidine-3'-phosphorothioate
  misc_feature 1..19: note = RNA
  misc_feature 20..21: note = DNA
atgccagtaggtcatgaattt

SEQ ID NO: 543 - DNA, 21 bp, synthetic construct
  source 1..21: mol_type = other DNA
  modified_base 1: mod_base = OTHER; note = 2'-O-methyluridine-3'-phosphate
  modified_base 2: mod_base = OTHER; note = 2'-O-methylcytidine-3'-phosphate
  modified_base 3: mod_base = OTHER; note = adenosine-3'-phosphate
  modified_base 4: mod_base = OTHER; note = 2'-O-methyluridine-3'-phosphate
  modified_base 5: mod_base = OTHER; note = guanosine-3'-phosphate
  modified_base 6: mod_base = OTHER; note = adenosine-3'-phosphate
  modified_base 7: mod_base = OTHER; note = 2'-O-methylcytidine-3'-phosphate
  modified_base 8: mod_base = OTHER; note = 2'-O-methylcytidine-3'-phosphate
  modified_base 9: mod_base = OTHER; note = 2'-O-methyluridine-3'-phosphate
  modified_base 10: mod_base = OTHER; note = adenosine-3'-phosphate
  modified_base 11: mod_base = OTHER; note = 2'-O-methylcytidine-3'-phosphate
  modified_base 12: mod_base = OTHER; note = 2'-O-methyluridine-3'-phosphate
  modified_base 13: mod_base = OTHER; note = guanosine-3'-phosphate
  modified_base 14: mod_base = OTHER; note = guanosine-3'-phosphate
  modified_base 15: mod_base = OTHER; note = 2'-O-methylcytidine-3'-phosphate
  modified_base 16: mod_base = OTHER; note = adenosine-3'-phosphate
  modified_base 17: mod_base = OTHER; note = 2'-O-methyluridine-3'-phosphate
  modified_base 18: mod_base = OTHER; note = 2'-O-methyluridine-3'-phosphate
  modified_base 19: mod_base = OTHER; note = 2'-O-methyluridine-3'-phosphate
  modified_base 20: mod_base = OTHER; note = 2'-deoxythymidine-3'-phosphorothioate
  misc_feature 1..19: note = RNA
  misc_feature 20..21: note = DNA
tcatgacctactggcattttt

SEQ ID NO: 544 - DNA, 21 bp, synthetic construct
  source 1..21: mol_type = other DNA
  modified_base 1: mod_base = OTHER; note = adenosine-3'-phosphate
  modified_base 2: mod_base = OTHER; note = adenosine-3'-phosphate
  modified_base 3: mod_base = OTHER; note = adenosine-3'-phosphate
  modified_base 4: mod_base = OTHER; note = uridine-3'-phosphate
  modified_base 5: mod_base = OTHER; note = guanosine-3'-phosphate
  modified_base 6: mod_base = OTHER; note = cytidine-3'-phosphate
  modified_base 7: mod_base = OTHER; note = 2'-O-methylcytidine-3'-phosphate
  modified_base 8: mod_base = OTHER; note = adenosine-3'-phosphate
  modified_base 9: mod_base = OTHER; note = guanosine-3'-phosphate
  modified_base 10: mod_base = OTHER; note = 2'-O-methyluridine-3'-phosphate
  modified_base 11: mod_base = OTHER; note = adenosine-3'-phosphate
  modified_base 12: mod_base = OTHER; note = guanosine-3'-phosphate
  modified_base 13: mod_base = OTHER; note = guanosine-3'-phosphate
  modified_base 14: mod_base = OTHER; note = uridine-3'-phosphate
  modified_base 15: mod_base = OTHER; note = 2'-O-methylcytidine-3'-phosphate
  modified_base 16: mod_base = OTHER; note = adenosine-3'-phosphate
  modified_base 17: mod_base = OTHER; note = uridine-3'-phosphate
  modified_base 18: mod_base = OTHER; note = guanosine-3'-phosphate
  modified_base 19: mod_base = OTHER; note = adenosine-3'-phosphate
  modified_base 20: mod_base = OTHER; note = 2'-deoxythymidine-3'-phosphorothioate
  misc_feature 1..19: note = RNA
  misc_feature 20..21: note = DNA
aaatgccagtaggtcatgatt

SEQ ID NO: 545 - DNA, 21 bp, synthetic construct
  source 1..21: mol_type = other DNA
  modified_base 1: mod_base = OTHER; note = 2'-O-methyluridine-3'-phosphate
  modified_base 2: mod_base = OTHER; note = adenosine-3'-phosphate
  modified_base 3: mod_base = OTHER; note = 2'-O-methylcytidine-3'-phosphate
  modified_base 4: mod_base = OTHER; note = 2'-O-methyluridine-3'-phosphate
  modified_base 5: mod_base = OTHER; note = guanosine-3'-phosphate
  modified_base 6: mod_base = OTHER; note = guanosine-3'-phosphate
  modified_base 7: mod_base = OTHER; note = 2'-O-methylcytidine-3'-phosphate
  modified_base 8: mod_base = OTHER; note = adenosine-3'-phosphate
  modified_base 9: mod_base = OTHER; note = 2'-O-methyluridine-3'-phosphate
  modified_base 10: mod_base = OTHER; note = 2'-O-methyluridine-3'-phosphate
  modified_base 11: mod_base = OTHER; note = 2'-O-methyluridine-3'-phosphate
  modified_base 12: mod_base = OTHER; note = guanosine-3'-phosphate
  modified_base 13: mod_base = OTHER; note = 2'-O-methylcytidine-3'-phosphate
  modified_base 14: mod_base = OTHER; note = 2'-O-methyluridine-3'-phosphate
  modified_base 15: mod_base = OTHER; note = guanosine-3'-phosphate
  modified_base 16: mod_base = OTHER; note = adenosine-3'-phosphate
  modified_base 17: mod_base = OTHER; note = adenosine-3'-phosphate
  modified_base 18: mod_base = OTHER; note = 2'-O-methylcytidine-3'-phosphate
  modified_base 19: mod_base = OTHER; note = guanosine-3'-phosphate
  modified_base 20: mod_base = OTHER; note = 2'-deoxythymidine-3'-phosphorothioate
  misc_feature 1..19: note = RNA
  misc_feature 20..21: note = DNA
tactggcatttgctgaacgtt

SEQ ID NO: 546 - DNA, 21 bp, synthetic construct
  source 1..21: mol_type = other DNA
  modified_base 1: mod_base = OTHER; note = cytidine-3'-phosphate
  modified_base 2: mod_base = OTHER; note = guanosine-3'-phosphate
  modified_base 3: mod_base = OTHER; note = uridine-3'-phosphate
  modified_base 4: mod_base = OTHER; note = uridine-3'-phosphate
  modified_base 5: mod_base = OTHER; note = 2'-O-methylcytidine-3'-phosphate
  modified_base 6: mod_base = OTHER; note = adenosine-3'-phosphate
  modified_base 7: mod_base = OTHER; note = guanosine-3'-phosphate
  modified_base 8: mod_base = OTHER; note = 2'-O-methylcytidine-3'-phosphate
  modified_base 9: mod_base = OTHER; note = adenosine-3'-phosphate
  modified_base 10: mod_base = OTHER; note = adenosine-3'-phosphate
  modified_base 11: mod_base = OTHER; note = adenosine-3'-phosphate
  modified_base 12: mod_base = OTHER; note = uridine-3'-phosphate
  modified_base 13: mod_base = OTHER; note = guanosine-3'-phosphate
  modified_base 14: mod_base = OTHER; note = cytidine-3'-phosphate
  modified_base 15: mod_base = OTHER; note = 2'-O-methylcytidine-3'-phosphate
  modified_base 16: mod_base = OTHER; note = adenosine-3'-phosphate
  modified_base 17: mod_base = OTHER; note = guanosine-3'-phosphate
  modified_base 18: mod_base = OTHER; note = 2'-O-methyluridine-3'-phosphate
  modified_base 19: mod_base = OTHER; note = adenosine-3'-phosphate
  modified_base 20: mod_base = OTHER; note = 2'-deoxythymidine-3'-phosphorothioate
  misc_feature 1..19: note = RNA
  misc_feature 20..21: note = DNA
cgttcagcaaatgccagtatt

SEQ ID NO: 547 - DNA, 21 bp, synthetic construct
  source 1..21: mol_type = other DNA
  modified_base 1: mod_base = OTHER; note = 2'-O-methylcytidine-3'-phosphate
  modified_base 2: mod_base = OTHER; note = 2'-O-methyluridine-3'-phosphate
  modified_base 3: mod_base = OTHER; note = guanosine-3'-phosphate
  modified_base 4: mod_base = OTHER; note = guanosine-3'-phosphate
  modified_base 5: mod_base = OTHER; note = 2'-O-methylcytidine-3'-phosphate
  modified_base 6: mod_base = OTHER; note = adenosine-3'-phosphate
  modified_base 7: mod_base = OTHER; note = 2'-O-methyluridine-3'-phosphate
  modified_base 8: mod_base = OTHER; note = 2'-O-methyluridine-3'-phosphate
  modified_base 9: mod_base = OTHER; note = 2'-O-methyluridine-3'-phosphate
  modified_base 10: mod_base = OTHER; note = guanosine-3'-phosphate
  modified_base 11: mod_base = OTHER; note = 2'-O-methylcytidine-3'-phosphate
  modified_base 12: mod_base = OTHER; note = 2'-O-methyluridine-3'-phosphate
  modified_base 13: mod_base = OTHER; note = guanosine-3'-phosphate
  modified_base 14: mod_base = OTHER; note = adenosine-3'-phosphate
  modified_base 15: mod_base = OTHER; note = adenosine-3'-phosphate
  modified_base 16: mod_base = OTHER; note = 2'-O-methylcytidine-3'-phosphate
  modified_base 17: mod_base = OTHER; note = guanosine-3'-phosphate
  modified_base 18: mod_base = OTHER; note = 2'-O-methylcytidine-3'-phosphate
  modified_base 19: mod_base = OTHER; note = adenosine-3'-phosphate
  modified_base 20: mod_base = OTHER; note = 2'-deoxythymidine-3'-phosphorothioate
  misc_feature 1..19: note = RNA
  misc_feature 20..21: note = DNA
ctggcatttgctgaacgcatt

SEQ ID NO: 548 - DNA, 21 bp, synthetic construct
  source 1..21: mol_type = other DNA
  modified_base 1: mod_base = OTHER; note = uridine-3'-phosphate
  modified_base 2: mod_base = OTHER; note = guanosine-3'-phosphate
  modified_base 3: mod_base = OTHER; note = cytidine-3'-phosphate
  modified_base 4: mod_base = OTHER; note = guanosine-3'-phosphate
  modified_base 5: mod_base = OTHER; note = uridine-3'-phosphate
  modified_base 6: mod_base = OTHER; note = uridine-3'-phosphate
  modified_base 7: mod_base = OTHER; note = 2'-O-methylcytidine-3'-phosphate
  modified_base 8: mod_base = OTHER; note = adenosine-3'-phosphate
  modified_base 9: mod_base = OTHER; note = guanosine-3'-phosphate
  modified_base 10: mod_base = OTHER; note = 2'-O-methylcytidine-3'-phosphate
  modified_base 11: mod_base = OTHER; note = adenosine-3'-phosphate
  modified_base 12: mod_base = OTHER; note = adenosine-3'-phosphate
  modified_base 13: mod_base = OTHER; note = adenosine-3'-phosphate
  modified_base 14: mod_base = OTHER; note = uridine-3'-phosphate
  modified_base 15: mod_base = OTHER; note = guanosine-3'-phosphate
  modified_base 16: mod_base = OTHER; note = cytidine-3'-phosphate
  modified_base 17: mod_base = OTHER; note = 2'-O-methylcytidine-3'-phosphate
  modified_base 18: mod_base = OTHER; note = adenosine-3'-phosphate
  modified_base 19: mod_base = OTHER; note = guanosine-3'-phosphate
  modified_base 20: mod_base = OTHER; note = 2'-deoxythymidine-3'-phosphorothioate
  misc_feature 1..19: note = RNA
  misc_feature 20..21: note = DNA
tgcgttcagcaaatgccagtt

SEQ ID NO: 549 - DNA, 21 bp, synthetic construct
  source 1..21: mol_type = other DNA
  modified_base 1: mod_base = OTHER; note = adenosine-3'-phosphate
  modified_base 2: mod_base = OTHER; note = 2'-O-methyluridine-3'-phosphate
  modified_base 3: mod_base = OTHER; note = 2'-O-methyluridine-3'-phosphate
  modified_base 4: mod_base = OTHER; note = 2'-O-methyluridine-3'-phosphate
  modified_base 5: mod_base = OTHER; note = guanosine-3'-phosphate
  modified_base 6: mod_base = OTHER; note = 2'-O-methylcytidine-3'-phosphate
  modified_base 7: mod_base = OTHER; note = 2'-O-methyluridine-3'-phosphate
  modified_base 8: mod_base = OTHER; note = guanosine-3'-phosphate
  modified_base 9: mod_base = OTHER; note = adenosine-3'-phosphate
  modified_base 10: mod_base = OTHER; note = adenosine-3'-phosphate
  modified_base 11: mod_base = OTHER; note = 2'-O-methylcytidine-3'-phosphate
  modified_base 12: mod_base = OTHER; note = guanosine-3'-phosphate
  modified_base 13: mod_base = OTHER; note = 2'-O-methylcytidine-3'-phosphate
  modified_base 14: mod_base = OTHER; note = adenosine-3'-phosphate
  modified_base 15: mod_base = OTHER; note = 2'-O-methyluridine-3'-phosphate
  modified_base 16: mod_base = OTHER; note = 2'-O-methyluridine-3'-phosphate
  modified_base 17: mod_base = OTHER; note = 2'-O-methyluridine-3'-phosphate
  modified_base 18: mod_base = OTHER; note = adenosine-3'-phosphate
  modified_base 19: mod_base = OTHER; note = 2'-O-methylcytidine-3'-phosphate
  modified_base 20: mod_base = OTHER; note = 2'-deoxythymidine-3'-phosphorothioate
  misc_feature 1..19: note = RNA
  misc_feature 20..21: note = DNA
atttgctgaacgcatttactt

SEQ ID NO: 550 - DNA, 21 bp, synthetic construct
  source 1..21: mol_type = other DNA
  modified_base 1: mod_base = OTHER; note = guanosine-3'-phosphate
  modified_base 2: mod_base = OTHER; note = 2'-O-methyluridine-3'-phosphate
  modified_base 3: mod_base = OTHER; note = adenosine-3'-phosphate
  modified_base 4: mod_base = OTHER; note = adenosine-3'-phosphate
  modified_base 5: mod_base = OTHER; note = adenosine-3'-phosphate
  modified_base 6: mod_base = OTHER; note = uridine-3'-phosphate
  modified_base 7: mod_base = OTHER; note = guanosine-3'-phosphate
  modified_base 8: mod_base = OTHER; note = cytidine-3'-phosphate
  modified_base 9: mod_base = OTHER; note = guanosine-3'-phosphate
  modified_base 10: mod_base = OTHER; note = uridine-3'-phosphate
  modified_base 11: mod_base = OTHER; note = uridine-3'-phosphate
  modified_base 12: mod_base = OTHER; note = 2'-O-methylcytidine-3'-phosphate
  modified_base 13: mod_base = OTHER; note = adenosine-3'-phosphate
  modified_base 14: mod_base = OTHER; note = guanosine-3'-phosphate
  modified_base 15: mod_base = OTHER; note = 2'-O-methylcytidine-3'-phosphate
  modified_base 16: mod_base = OTHER; note = adenosine-3'-phosphate
  modified_base 17: mod_base = OTHER; note = adenosine-3'-phosphate
  modified_base 18: mod_base = OTHER; note = adenosine-3'-phosphate
  modified_base 19: mod_base = OTHER; note = uridine-3'-phosphate
  modified_base 20: mod_base = OTHER; note = 2'-deoxythymidine-3'-phosphorothioate
  misc_feature 1..19: note = RNA
  misc_feature 20..21: note = DNA
gtaaatgcgttcagcaaattt

SEQ ID NO: 551 - DNA, 21 bp, synthetic construct
  source 1..21: mol_type = other DNA
  modified_base 1: mod_base = OTHER; note = 2'-O-methyluridine-3'-phosphate
  modified_base 2: mod_base = OTHER; note = 2'-O-methyluridine-3'-phosphate
  modified_base 3: mod_base = OTHER; note = 2'-O-methyluridine-3'-phosphate
  modified_base 4: mod_base = OTHER; note = guanosine-3'-phosphate
  modified_base 5: mod_base = OTHER; note = 2'-O-methylcytidine-3'-phosphate
  modified_base 6: mod_base = OTHER; note = 2'-O-methyluridine-3'-phosphate
  modified_base 7: mod_base = OTHER; note = guanosine-3'-phosphate
  modified_base 8: mod_base = OTHER; note = adenosine-3'-phosphate
  modified_base 9: mod_base = OTHER; note = adenosine-3'-phosphate
  modified_base 10: mod_base = OTHER; note = 2'-O-methylcytidine-3'-phosphate
  modified_base 11: mod_base = OTHER; note = guanosine-3'-phosphate
  modified_base 12: mod_base = OTHER; note = 2'-O-methylcytidine-3'-phosphate
  modified_base 13: mod_base = OTHER; note = adenosine-3'-phosphate
  modified_base 14: mod_base = OTHER; note = 2'-O-methyluridine-3'-phosphate
  modified_base 15: mod_base = OTHER; note = 2'-O-methyluridine-3'-phosphate
  modified_base 16: mod_base = OTHER; note = 2'-O-methyluridine-3'-phosphate
  modified_base 17: mod_base = OTHER; note = adenosine-3'-phosphate
  modified_base 18: mod_base = OTHER; note = 2'-O-methylcytidine-3'-phosphate
  modified_base 19: mod_base = OTHER; note = 2'-O-methyluridine-3'-phosphate
  modified_base 20: mod_base = OTHER; note = 2'-deoxythymidine-3'-phosphorothioate
  misc_feature 1..19: note = RNA
  misc_feature 20..21: note = DNA
tttgctgaacgcatttacttt

SEQ ID NO: 552 - DNA, 21 bp, synthetic construct
  source 1..21: mol_type = other DNA
  modified_base 1: mod_base = OTHER; note = adenosine-3'-phosphate
  modified_base 2: mod_base = OTHER; note = guanosine-3'-phosphate
  modified_base 3: mod_base = OTHER; note = 2'-O-methyluridine-3'-phosphate
  modified_base 4: mod_base = OTHER; note = adenosine-3'-phosphate
  modified_base 5: mod_base = OTHER; note = adenosine-3'-phosphate
  modified_base 6: mod_base = OTHER; note = adenosine-3'-phosphate
  modified_base 7: mod_base = OTHER; note = uridine-3'-phosphate
  modified_base 8: mod_base = OTHER; note = guanosine-3'-phosphate
  modified_base 9: mod_base = OTHER; note = cytidine-3'-phosphate
  modified_base 10: mod_base = OTHER; note = guanosine-3'-phosphate
  modified_base 11: mod_base = OTHER; note = uridine-3'-phosphate
  modified_base 12: mod_base = OTHER; note = uridine-3'-phosphate
  modified_base 13: mod_base = OTHER; note = 2'-O-methylcytidine-3'-phosphate
  modified_base 14: mod_base = OTHER; note = adenosine-3'-phosphate
  modified_base 15: mod_base = OTHER; note = guanosine-3'-phosphate
  modified_base 16: mod_base = OTHER; note = 2'-O-methylcytidine-3'-phosphate
  modified_base 17: mod_base = OTHER; note = adenosine-3'-phosphate
  modified_base 18: mod_base = OTHER; note = adenosine-3'-phosphate
  modified_base 19: mod_base = OTHER; note = adenosine-3'-phosphate
  modified_base 20: mod_base = OTHER; note = 2'-deoxythymidine-3'-phosphorothioate
  misc_feature 1..19: note = RNA
  misc_feature 20..21: note = DNA
agtaaatgcgttcagcaaatt

SEQ ID NO: 553 - DNA, 21 bp, synthetic construct
  source 1..21: mol_type = other DNA
  modified_base 1: mod_base = OTHER; note = guanosine-3'-phosphate
  modified_base 2: mod_base = OTHER; note = 2'-O-methylcytidine-3'-phosphate
  modified_base 3: mod_base = OTHER; note = 2'-O-methyluridine-3'-phosphate
  modified_base 4: mod_base = OTHER; note = guanosine-3'-phosphate
  modified_base 5: mod_base = OTHER; note = adenosine-3'-phosphate
  modified_base 6: mod_base = OTHER; note = adenosine-3'-phosphate
  modified_base 7: mod_base = OTHER; note = 2'-O-methylcytidine-3'-phosphate
  modified_base 8: mod_base = OTHER; note = guanosine-3'-phosphate
  modified_base 9: mod_base = OTHER; note = 2'-O-methylcytidine-3'-phosphate
  modified_base 10: mod_base = OTHER; note = adenosine-3'-phosphate
  modified_base 11: mod_base = OTHER; note = 2'-O-methyluridine-3'-phosphate
  modified_base 12: mod_base = OTHER; note = 2'-O-methyluridine-3'-phosphate
  modified_base 13: mod_base = OTHER; note = 2'-O-methyluridine-3'-phosphate
  modified_base 14: mod_base = OTHER; note = adenosine-3'-phosphate
  modified_base 15: mod_base = OTHER; note = 2'-O-methylcytidine-3'-phosphate
  modified_base 16: mod_base = OTHER; note = 2'-O-methyluridine-3'-phosphate
  modified_base 17: mod_base = OTHER; note = guanosine-3'-phosphate
  modified_base 18: mod_base = OTHER; note = 2'-O-methyluridine-3'-phosphate
  modified_base 19: mod_base = OTHER; note = 2'-O-methylcytidine-3'-phosphate
  modified_base 20: mod_base = OTHER; note = 2'-deoxythymidine-3'-phosphorothioate
  misc_feature 1..19: note = RNA
  misc_feature 20..21: note = DNA
gctgaacgcatttactgtctt

SEQ ID NO: 554 - DNA, 21 bp, synthetic construct
  source 1..21: mol_type = other DNA
  modified_base 1: mod_base = OTHER; note = guanosine-3'-phosphate
  modified_base 2: mod_base = OTHER; note = adenosine-3'-phosphate
  modified_base 3: mod_base = OTHER; note = 2'-O-methylcytidine-3'-phosphate
  modified_base 4: mod_base = OTHER; note = adenosine-3'-phosphate
  modified_base 5: mod_base = OTHER; note = guanosine-3'-phosphate
  modified_base 6: mod_base = OTHER; note = 2'-O-methyluridine-3'-phosphate
  modified_base 7: mod_base = OTHER; note = adenosine-3'-phosphate
  modified_base 8: mod_base = OTHER; note = adenosine-3'-phosphate
  modified_base 9: mod_base = OTHER; note = adenosine-3'-phosphate
  modified_base 10: mod_base = OTHER; note = uridine-3'-phosphate
  modified_base 11: mod_base = OTHER; note = guanosine-3'-phosphate
  modified_base 12: mod_base = OTHER; note = cytidine-3'-phosphate
  modified_base 13: mod_base = OTHER; note = guanosine-3'-phosphate
  modified_base 14: mod_base = OTHER; note = uridine-3'-phosphate
  modified_base 15: mod_base = OTHER; note = uridine-3'-phosphate
  modified_base 16: mod_base = OTHER; note = 2'-O-methylcytidine-3'-phosphate
  modified_base 17: mod_base = OTHER; note = adenosine-3'-phosphate
  modified_base 18: mod_base = OTHER; note = guanosine-3'-phosphate
  modified_base 19: mod_base = OTHER; note = cytidine-3'-phosphate
  modified_base 20: mod_base = OTHER; note = 2'-deoxythymidine-3'-phosphorothioate
  misc_feature 1..19: note = RNA
  misc_feature 20..21: note = DNA
gacagtaaatgcgttcagctt

SEQ ID NO: 555 - DNA, 21 bp, synthetic construct
  source 1..21: mol_type = other DNA
  modified_base 1: mod_base = OTHER; note = 2'-O-methyluridine-3'-phosphate
  modified_base 2: mod_base = OTHER; note = 2'-O-methyluridine-3'-phosphate
  modified_base 3: mod_base = OTHER; note = 2'-O-methyluridine-3'-phosphate
  modified_base 4: mod_base = OTHER; note = adenosine-3'-phosphate
  modified_base 5: mod_base = OTHER; note = 2'-O-methylcytidine-3'-phosphate
  modified_base 6: mod_base = OTHER; note = 2'-O-methyluridine-3'-phosphate
  modified_base 7: mod_base = OTHER; note = guanosine-3'-phosphate
  modified_base 8: mod_base = OTHER; note = 2'-O-methyluridine-3'-phosphate
  modified_base 9: mod_base = OTHER; note = 2'-O-methylcytidine-3'-phosphate
  modified_base 10: mod_base = OTHER; note = adenosine-3'-phosphate
  modified_base 11: mod_base = OTHER; note = 2'-O-methylcytidine-3'-phosphate
  modified_base 12: mod_base = OTHER; note = guanosine-3'-phosphate
  modified_base 13: mod_base = OTHER; note = guanosine-3'-phosphate
  modified_base 14: mod_base = OTHER; note = 2'-O-methyluridine-3'-phosphate
  modified_base 15: mod_base = OTHER; note = 2'-O-methyluridine-3'-phosphate
  modified_base 16: mod_base = OTHER; note = 2'-O-methylcytidine-3'-phosphate
  modified_base 17: mod_base = OTHER; note = 2'-O-methylcytidine-3'-phosphate
  modified_base 18: mod_base = OTHER; note = 2'-O-methylcytidine-3'-phosphate
  modified_base 19: mod_base = OTHER; note = adenosine-3'-phosphate
  modified_base 20: mod_base = OTHER; note = 2'-deoxythymidine-3'-phosphorothioate
  misc_feature 1..19: note = RNA
  misc_feature 20..21: note = DNA
tttactgtcacggttcccatt

SEQ ID NO: 556 - DNA, 21 bp, synthetic construct
  source 1..21: mol_type = other DNA
  modified_base 1: mod_base = OTHER; note = uridine-3'-phosphate
  modified_base 2: mod_base = OTHER; note = guanosine-3'-phosphate
  modified_base 3: mod_base = OTHER; note = guanosine-3'-phosphate
  modified_base 4: mod_base = OTHER; note = guanosine-3'-phosphate
  modified_base 5: mod_base = OTHER; note = adenosine-3'-phosphate
  modified_base 6: mod_base = OTHER; note = adenosine-3'-phosphate
  modified_base 7: mod_base = OTHER; note = cytidine-3'-phosphate
  modified_base 8: mod_base = OTHER; note = cytidine-3'-phosphate
  modified_base 9: mod_base = OTHER; note = guanosine-3'-phosphate
  modified_base 10: mod_base = OTHER; note = uridine-3'-phosphate
  modified_base 11: mod_base = OTHER; note = guanosine-3'-phosphate
  modified_base 12: mod_base = OTHER; note = adenosine-3'-phosphate
  modified_base 13: mod_base = OTHER; note = 2'-O-methylcytidine-3'-phosphate
  modified_base 14: mod_base = OTHER; note = adenosine-3'-phosphate
  modified_base 15: mod_base = OTHER; note = guanosine-3'-phosphate
  modified_base 16: mod_base = OTHER; note = 2'-O-methyluridine-3'-phosphate
  modified_base 17: mod_base = OTHER; note = adenosine-3'-phosphate
  modified_base 18: mod_base = OTHER; note = adenosine-3'-phosphate
  modified_base 19: mod_base = OTHER; note = adenosine-3'-phosphate
  modified_base 20: mod_base = OTHER; note = 2'-deoxythymidine-3'-phosphorothioate
  misc_feature 1..19: note = RNA
  misc_feature 20..21: note = DNA
tgggaaccgtgacagtaaatt

SEQ ID NO: 557 - DNA, 21 bp, synthetic construct
  source 1..21: mol_type = other DNA
  modified_base 1: mod_base = OTHER; note = adenosine-3'-phosphate
  modified_base 2: mod_base = OTHER; note = 2'-O-methylcytidine-3'-phosphate
  modified_base 3: mod_base = OTHER; note = guanosine-3'-phosphate
  modified_base 4: mod_base = OTHER; note = guanosine-3'-phosphate
  modified_base 5: mod_base = OTHER; note = 2'-O-methyluridine-3'-phosphate
  modified_base 6: mod_base = OTHER; note = 2'-O-methyluridine-3'-phosphate
  modified_base 7: mod_base = OTHER; note = 2'-O-methylcytidine-3'-phosphate
  modified_base 8: mod_base = OTHER; note = 2'-O-methylcytidine-3'-phosphate
  modified_base 9: mod_base = OTHER; note = 2'-O-methylcytidine-3'-phosphate
  modified_base 10: mod_base = OTHER; note = adenosine-3'-phosphate
  modified_base 11: mod_base = OTHER; note = adenosine-3'-phosphate
  modified_base 12: mod_base = OTHER; note = guanosine-3'-phosphate
  modified_base 13: mod_base = OTHER; note = guanosine-3'-phosphate
  modified_base 14: mod_base = OTHER; note = adenosine-3'-phosphate
  modified_base 15: mod_base = OTHER; note = 2'-O-methylcytidine-3'-phosphate
  modified_base 16: mod_base = OTHER; note = 2'-O-methylcytidine-3'-phosphate
  modified_base 17: mod_base = OTHER; note = 2'-O-methyluridine-3'-phosphate
  modified_base 18: mod_base = OTHER; note = adenosine-3'-phosphate
  modified_base 19: mod_base = OTHER; note = 2'-O-methyluridine-3'-phosphate
  modified_base 20: mod_base = OTHER; note = 2'-deoxythymidine-3'-phosphorothioate
  misc_feature 1..19: note = RNA
  misc_feature 20..21: note = DNA
acggttcccaaggacctattt

SEQ ID NO: 558 - DNA, 21 bp, synthetic construct
  source 1..21: mol_type = other DNA
  modified_base 1: mod_base = OTHER; note = adenosine-3'-phosphate
  modified_base 2: mod_base = OTHER; note = 2'-O-methyluridine-3'-phosphate
  modified_base 3: mod_base = OTHER; note = adenosine-3'-phosphate
  modified_base 4: mod_base = OTHER; note = guanosine-3'-phosphate
  modified_base 5: mod_base = OTHER; note = guanosine-3'-phosphate
  modified_base 6: mod_base = OTHER; note = uridine-3'-phosphate
  modified_base 7: mod_base = OTHER; note = cytidine-3'-phosphate
  modified_base 8: mod_base = OTHER; note = cytidine-3'-phosphate
  modified_base 9: mod_base = OTHER; note = uridine-3'-phosphate
  modified_base 10: mod_base = OTHER; note = uridine-3'-phosphate
  modified_base 11: mod_base = OTHER; note = guanosine-3'-phosphate
  modified_base 12: mod_base = OTHER; note = guanosine-3'-phosphate
  modified_base 13: mod_base = OTHER; note = guanosine-3'-phosphate
  modified_base 14: mod_base = OTHER; note = adenosine-3'-phosphate
  modified_base 15: mod_base = OTHER; note = adenosine-3'-phosphate
  modified_base 16: mod_base = OTHER; note = cytidine-3'-phosphate
  modified_base 17: mod_base = OTHER; note = cytidine-3'-phosphate
  modified_base 18: mod_base = OTHER; note = guanosine-3'-phosphate
  modified_base 19: mod_base = OTHER; note = uridine-3'-phosphate
  modified_base 20: mod_base = OTHER; note = 2'-deoxythymidine-3'-phosphorothioate
  misc_feature 1..19: note = RNA
  misc_feature 20..21: note = DNA
ataggtccttgggaaccgttt

SEQ ID NO: 559 - DNA, 21 bp, synthetic construct
  source 1..21: mol_type = other DNA
  modified_base 1: mod_base = OTHER; note = 2'-O-methylcytidine-3'-phosphate
  modified_base 2: mod_base = OTHER; note = guanosine-3'-phosphate
  modified_base 3: mod_base = OTHER; note = guanosine-3'-phosphate
  modified_base 4: mod_base = OTHER; note = 2'-O-methyluridine-3'-phosphate
  modified_base 5: mod_base = OTHER; note = 2'-O-methyluridine-3'-phosphate
  modified_base 6: mod_base = OTHER; note = 2'-O-methylcytidine-3'-phosphate
  modified_base 7: mod_base = OTHER; note = 2'-O-methylcytidine-3'-phosphate
  modified_base 8: mod_base = OTHER; note = 2'-O-methylcytidine-3'-phosphate
  modified_base 9: mod_base = OTHER; note = adenosine-3'-phosphate
  modified_base 10: mod_base = OTHER; note = adenosine-3'-phosphate
  modified_base 11: mod_base = OTHER; note = guanosine-3'-phosphate
  modified_base 12: mod_base = OTHER; note = guanosine-3'-phosphate
  modified_base 13: mod_base = OTHER; note = adenosine-3'-phosphate
  modified_base 14: mod_base = OTHER; note = 2'-O-methylcytidine-3'-phosphate
  modified_base 15: mod_base = OTHER; note = 2'-O-methylcytidine-3'-phosphate
  modified_base 16: mod_base = OTHER; note = 2'-O-methyluridine-3'-phosphate
  modified_base 17: mod_base = OTHER; note = adenosine-3'-phosphate
  modified_base 18: mod_base = OTHER; note = 2'-O-methyluridine-3'-phosphate
  modified_base 19: mod_base = OTHER; note = adenosine-3'-phosphate
  modified_base 20: mod_base = OTHER; note = 2'-deoxythymidine-3'-phosphorothioate
  misc_feature 1..19: note = RNA
  misc_feature 20..21: note = DNA
cggttcccaaggacctatatt

SEQ ID NO: 560 - DNA, 21 bp, synthetic construct
  source 1..21: mol_type = other DNA
  modified_base 1: mod_base = OTHER; note = 2'-O-methyluridine-3'-phosphate
  modified_base 2: mod_base = OTHER; note = adenosine-3'-phosphate
  modified_base 3: mod_base = OTHER; note = 2'-O-methyluridine-3'-phosphate
  modified_base 4: mod_base = OTHER; note = adenosine-3'-phosphate
  modified_base 5: mod_base = OTHER; note = guanosine-3'-phosphate
  modified_base 6: mod_base = OTHER; note = guanosine-3'-phosphate
  modified_base 7: mod_base = OTHER; note = uridine-3'-phosphate
  modified_base 8: mod_base = OTHER; note = cytidine-3'-phosphate
  modified_base 9: mod_base = OTHER; note = cytidine-3'-phosphate
  modified_base 10: mod_base = OTHER; note = uridine-3'-phosphate
  modified_base 11: mod_base = OTHER; note = uridine-3'-phosphate
  modified_base 12: mod_base = OTHER; note = guanosine-3'-phosphate
  modified_base 13: mod_base = OTHER; note = guanosine-3'-phosphate
  modified_base 14: mod_base = OTHER; note = guanosine-3'-phosphate
  modified_base 15: mod_base = OTHER; note = adenosine-3'-phosphate
  modified_base 16: mod_base = OTHER; note = adenosine-3'-phosphate
  modified_base 17: mod_base = OTHER; note = cytidine-3'-phosphate
  modified_base 18: mod_base = OTHER; note = cytidine-3'-phosphate
  modified_base 19: mod_base = OTHER; note = guanosine-3'-phosphate
  modified_base 20: mod_base = OTHER; note = 2'-deoxythymidine-3'-phosphorothioate
  misc_feature 1..19: note = RNA
  misc_feature 20..21: note = DNA
tataggtccttgggaaccgtt

SEQ ID NO: 561 - DNA, 21 bp, synthetic construct
  source 1..21: mol_type = other DNA
  modified_base 1: mod_base = OTHER; note = guanosine-3'-phosphate
  modified_base 2: mod_base = OTHER; note = guanosine-3'-phosphate
  modified_base 3: mod_base = OTHER; note = 2'-O-methyluridine-3'-phosphate
  modified_base 4: mod_base = OTHER; note = 2'-O-methyluridine-3'-phosphate
  modified_base 5: mod_base = OTHER; note = 2'-O-methylcytidine-3'-phosphate
  modified_base 6: mod_base = OTHER; note = 2'-O-methylcytidine-3'-phosphate
  modified_base 7: mod_base = OTHER; note = 2'-O-methylcytidine-3'-phosphate
  modified_base 8: mod_base = OTHER; note = adenosine-3'-phosphate
  modified_base 9: mod_base = OTHER; note = adenosine-3'-phosphate
  modified_base 10: mod_base = OTHER; note = guanosine-3'-phosphate
  modified_base 11: mod_base = OTHER; note = guanosine-3'-phosphate
  modified_base 12: mod_base = OTHER; note = adenosine-3'-phosphate
  modified_base 13: mod_base = OTHER; note = 2'-O-methylcytidine-3'-phosphate
  modified_base 14: mod_base = OTHER; note = 2'-O-methylcytidine-3'-phosphate
  modified_base 15: mod_base = OTHER; note = 2'-O-methyluridine-3'-phosphate
  modified_base 16: mod_base = OTHER; note = adenosine-3'-phosphate
  modified_base 17: mod_base = OTHER; note = 2'-O-methyluridine-3'-phosphate
  modified_base 18: mod_base = OTHER; note = adenosine-3'-phosphate
  modified_base 19: mod_base = OTHER; note = 2'-O-methyluridine-3'-phosphate
  modified_base 20: mod_base = OTHER; note = 2'-deoxythymidine-3'-phosphorothioate
  misc_feature 1..19: note = RNA
  misc_feature 20..21: note = DNA
ggttcccaaggacctatattt

SEQ ID NO: 562 - DNA, 21 bp, synthetic construct
  source 1..21: mol_type = other DNA
  modified_base 1: mod_base = OTHER; note = adenosine-3'-phosphate
  modified_base 2: mod_base = OTHER; note = 2'-O-methyluridine-3'-phosphate
  modified_base 3: mod_base = OTHER; note = adenosine-3'-phosphate
  modified_base 4: mod_base = OTHER; note = 2'-O-methyluridine-3'-phosphate
  modified_base 5: mod_base = OTHER; note = adenosine-3'-phosphate
  modified_base 6: mod_base = OTHER; note = guanosine-3'-phosphate
  modified_base 7: mod_base = OTHER; note = guanosine-3'-phosphate
  modified_base 8: mod_base = OTHER; note = uridine-3'-phosphate
  modified_base 9: mod_base = OTHER; note = cytidine-3'-phosphate
  modified_base 10: mod_base = OTHER; note = cytidine-3'-phosphate
  modified_base 11: mod_base = OTHER; note = uridine-3'-phosphate
  modified_base 12: mod_base = OTHER; note = uridine-3'-phosphate
  modified_base 13: mod_base = OTHER; note = guanosine-3'-phosphate
  modified_base 14: mod_base = OTHER; note = guanosine-3'-phosphate
  modified_base 15: mod_base = OTHER; note = guanosine-3'-phosphate
  modified_base 16: mod_base = OTHER; note = adenosine-3'-phosphate
  modified_base 17: mod_base = OTHER; note = adenosine-3'-phosphate
  modified_base 18: mod_base = OTHER; note = cytidine-3'-phosphate
  modified_base 19: mod_base = OTHER; note = cytidine-3'-phosphate
  modified_base 20: mod_base = OTHER; note = 2'-deoxythymidine-3'-phosphorothioate
  misc_feature 1..19: note = RNA
  misc_feature 20..21: note = DNA
atataggtccttgggaacctt

SEQ ID NO: 563 - DNA, 21 bp, synthetic construct
  source 1..21: mol_type = other DNA
  modified_base 1: mod_base = OTHER; note = guanosine-3'-phosphate
  modified_base 2: mod_base = OTHER; note = 2'-O-methyluridine-3'-phosphate
  modified_base 3: mod_base = OTHER; note = 2'-O-methyluridine-3'-phosphate
  modified_base 4: mod_base = OTHER; note = 2'-O-methylcytidine-3'-phosphate
  modified_base 5: mod_base = OTHER; note = 2'-O-methylcytidine-3'-phosphate
  modified_base 6: mod_base = OTHER; note = 2'-O-methylcytidine-3'-phosphate
  modified_base 7: mod_base = OTHER; note = adenosine-3'-phosphate
  modified_base 8: mod_base = OTHER; note = adenosine-3'-phosphate
  modified_base 9: mod_base = OTHER; note = guanosine-3'-phosphate
  modified_base 10: mod_base = OTHER; note = guanosine-3'-phosphate
  modified_base 11: mod_base = OTHER; note = adenosine-3'-phosphate
  modified_base 12: mod_base = OTHER; note = 2'-O-methylcytidine-3'-phosphate
  modified_base 13: mod_base = OTHER; note = 2'-O-methylcytidine-3'-phosphate
  modified_base 14: mod_base = OTHER; note = 2'-O-methyluridine-3'-phosphate
  modified_base 15: mod_base = OTHER; note = adenosine-3'-phosphate
  modified_base 16: mod_base = OTHER; note = 2'-O-methyluridine-3'-phosphate
  modified_base 17: mod_base = OTHER; note = adenosine-3'-phosphate
  modified_base 18: mod_base = OTHER; note = 2'-O-methyluridine-3'-phosphate
  modified_base 19: mod_base = OTHER; note = guanosine-3'-phosphate
  modified_base 20: mod_base = OTHER; note = 2'-deoxythymidine-3'-phosphorothioate
  misc_feature 1..19: note = RNA
  misc_feature 20..21: note = DNA
gttcccaaggacctatatgtt

SEQ ID NO: 564 - DNA, 21 bp, synthetic construct
  source 1..21: mol_type = other DNA
  modified_base 1: mod_base = OTHER; note = 2'-O-methylcytidine-3'-phosphate
  modified_base 2: mod_base = OTHER; note = adenosine-3'-phosphate
  modified_base 3: mod_base = OTHER; note = 2'-O-methyluridine-3'-phosphate
  modified_base 4: mod_base = OTHER; note = adenosine-3'-phosphate
  modified_base 5: mod_base = OTHER; note = 2'-O-methyluridine-3'-phosphate
  modified_base 6: mod_base = OTHER; note = adenosine-3'-phosphate
  modified_base 7: mod_base = OTHER; note = guanosine-3'-phosphate
  modified_base 8: mod_base = OTHER; note = guanosine-3'-phosphate
  modified_base 9: mod_base = OTHER; note = uridine-3'-phosphate
  modified_base 10: mod_base = OTHER; note = cytidine-3'-phosphate
  modified_base 11: mod_base = OTHER; note = cytidine-3'-phosphate
  modified_base 12: mod_base = OTHER; note = uridine-3'-phosphate
  modified_base 13: mod_base = OTHER; note = uridine-3'-phosphate
  modified_base 14: mod_base = OTHER; note = guanosine-3'-phosphate
  modified_base 15: mod_base = OTHER; note = guanosine-3'-phosphate
  modified_base 16: mod_base = OTHER; note = guanosine-3'-phosphate
  modified_base 17: mod_base = OTHER; note = adenosine-3'-phosphate
  modified_base 18: mod_base = OTHER; note = adenosine-3'-phosphate
  modified_base 19: mod_base = OTHER; note = cytidine-3'-phosphate
  modified_base 20: mod_base = OTHER; note = 2'-deoxythymidine-3'-phosphorothioate
  misc_feature 1..19: note = RNA
  misc_feature 20..21: note = DNA
catataggtccttgggaactt

SEQ ID NO: 565 - DNA, 21 bp, synthetic construct
  source 1..21: mol_type = other DNA
  modified_base 1: mod_base = OTHER; note = guanosine-3'-phosphate
  modified_base 2: mod_base = OTHER; note = adenosine-3'-phosphate
  modified_base 3: mod_base = OTHER; note = 2'-O-methylcytidine-3'-phosphate
  modified_base 4: mod_base = OTHER; note = 2'-O-methylcytidine-3'-phosphate
  modified_base 5: mod_base = OTHER; note = 2'-O-methyluridine-3'-phosphate
  modified_base 6: mod_base = OTHER; note = adenosine-3'-phosphate
  modified_base 7: mod_base = OTHER; note = 2'-O-methyluridine-3'-phosphate
  modified_base 8: mod_base = OTHER; note = adenosine-3'-phosphate
  modified_base 9: mod_base = OTHER; note = 2'-O-methyluridine-3'-phosphate
  modified_base 10: mod_base = OTHER; note = guanosine-3'-phosphate
  modified_base 11: mod_base = OTHER; note = 2'-O-methyluridine-3'-phosphate
  modified_base 12: mod_base = OTHER; note = guanosine-3'-phosphate
  modified_base 13: mod_base = OTHER; note = guanosine-3'-phosphate
  modified_base 14: mod_base = OTHER; note = 2'-O-methyluridine-3'-phosphate
  modified_base 15: mod_base = OTHER; note = adenosine-3'-phosphate
  modified_base 16: mod_base = OTHER; note = guanosine-3'-phosphate
  modified_base 17: mod_base = OTHER; note = adenosine-3'-phosphate
  modified_base 18: mod_base = OTHER; note = guanosine-3'-phosphate
  modified_base 19: mod_base = OTHER; note = 2'-O-methyluridine-3'-phosphate
  modified_base 20: mod_base = OTHER; note = 2'-deoxythymidine-3'-phosphorothioate
  misc_feature 1..19: note = RNA
  misc_feature 20..21: note = DNA
gacctatatgtggtagagttt

SEQ ID NO: 566 - DNA, 21 bp, synthetic construct
  source 1..21: mol_type = other DNA
  modified_base 1: mod_base = OTHER; note = adenosine-3'-phosphate
  modified_base 2: mod_base = OTHER; note = cytidine-3'-phosphate
  modified_base 3: mod_base = OTHER; note = uridine-3'-phosphate
  modified_base 4: mod_base = OTHER; note = cytidine-3'-phosphate
  modified_base 5: mod_base = OTHER; note = 2'-O-methyluridine-3'-phosphate
  modified_base 6: mod_base = OTHER; note = adenosine-3'-phosphate
  modified_base 7: mod_base = OTHER; note = cytidine-3'-phosphate
  modified_base 8: mod_base = OTHER; note = 2'-O-methylcytidine-3'-phosphate
  modified_base 9: mod_base = OTHER; note = adenosine-3'-phosphate
  modified_base 10: mod_base = OTHER; note = 2'-O-methylcytidine-3'-phosphate
  modified_base 11: mod_base = OTHER; note = adenosine-3'-phosphate
  modified_base 12: mod_base = OTHER; note = 2'-O-methyluridine-3'-phosphate
  modified_base 13: mod_base = OTHER; note = adenosine-3'-phosphate
  modified_base 14: mod_base = OTHER; note = 2'-O-methyluridine-3'-phosphate
  modified_base 15: mod_base = OTHER; note = adenosine-3'-phosphate
  modified_base 16: mod_base = OTHER; note = guanosine-3'-phosphate
  modified_base 17: mod_base = OTHER; note = guanosine-3'-phosphate
  modified_base 18: mod_base = OTHER; note = uridine-3'-phosphate
  modified_base 19: mod_base = OTHER; note = cytidine-3'-phosphate
  modified_base 20: mod_base = OTHER; note = 2'-deoxythymidine-3'-phosphorothioate
  misc_feature 1..19: note = RNA
  misc_feature 20..21: note = DNA
actctaccacatataggtctt

SEQ ID NO: 567 - DNA, 21 bp, synthetic construct
  source 1..21: mol_type = other DNA
  modified_base 1: mod_base = OTHER; note = 2'-O-methyluridine-3'-phosphate
  modified_base 2: mod_base = OTHER; note = guanosine-3'-phosphate
  modified_base 3: mod_base = OTHER; note = guanosine-3'-phosphate
  modified_base 4: mod_base = OTHER; note = 2'-O-methyluridine-3'-phosphate
  modified_base 5: mod_base = OTHER; note = adenosine-3'-phosphate
  modified_base 6: mod_base = OTHER; note = guanosine-3'-phosphate
  modified_base 7: mod_base = OTHER; note = adenosine-3'-phosphate
  modified_base 8: mod_base = OTHER; note = guanosine-3'-phosphate
  modified_base 9: mod_base = OTHER; note = 2'-O-methyluridine-3'-phosphate
  modified_base 10: mod_base = OTHER; note = adenosine-3'-phosphate
  modified_base 11: mod_base = OTHER; note = 2'-O-methyluridine-3'-phosphate
  modified_base 12: mod_base = OTHER; note = guanosine-3'-phosphate
  modified_base 13: mod_base = OTHER; note = guanosine-3'-phosphate
  modified_base 14: mod_base = OTHER; note = 2'-O-methyluridine-3'-phosphate
  modified_base 15: mod_base = OTHER; note = adenosine-3'-phosphate
  modified_base 16: mod_base = OTHER; note = guanosine-3'-phosphate
  modified_base 17: mod_base = OTHER; note = 2'-O-methylcytidine-3'-phosphate
  modified_base 18: mod_base = OTHER; note = adenosine-3'-phosphate
  modified_base 19: mod_base = OTHER; note = adenosine-3'-phosphate
  modified_base 20: mod_base = OTHER; note = 2'-deoxythymidine-3'-phosphorothioate
  misc_feature 1..19: note = RNA
  misc_feature 20..21: note = DNA
tggtagagtatggtagcaatt

SEQ ID NO: 568 - DNA, 21 bp, synthetic construct
  source 1..21: mol_type = other DNA
  modified_base 1: mod_base = OTHER; note = uridine-3'-phosphate
  modified_base 2: mod_base = OTHER; note = uridine-3'-phosphate
  modified_base 3: mod_base = OTHER; note = guanosine-3'-phosphate
  modified_base 4: mod_base = OTHER; note = cytidine-3'-phosphate
  modified_base 5: mod_base = OTHER; note = 2'-O-methyluridine-3'-phosphate
  modified_base 6: mod_base = OTHER; note = adenosine-3'-phosphate
  modified_base 7: mod_base = OTHER; note = cytidine-3'-phosphate
  modified_base 8: mod_base = OTHER; note = 2'-O-methylcytidine-3'-phosphate
  modified_base 9: mod_base = OTHER; note = adenosine-3'-phosphate
  modified_base 10: mod_base = OTHER; note = 2'-O-methyluridine-3'-phosphate
  modified_base 11: mod_base = OTHER; note = adenosine-3'-phosphate
  modified_base 12: mod_base = OTHER; note = cytidine-3'-phosphate
  modified_base 13: mod_base = OTHER; note = uridine-3'-phosphate
  modified_base 14: mod_base = OTHER; note = cytidine-3'-phosphate
  modified_base 15: mod_base = OTHER; note = 2'-O-methyluridine-3'-phosphate
  modified_base 16: mod_base = OTHER; note = adenosine-3'-phosphate
  modified_base 17: mod_base = OTHER; note = cytidine-3'-phosphate
  modified_base 18: mod_base = OTHER; note = 2'-O-methylcytidine-3'-phosphate
  modified_base 19: mod_base = OTHER; note = adenosine-3'-phosphate
  modified_base 20: mod_base = OTHER; note = 2'-deoxythymidine-3'-phosphorothioate
  misc_feature 1..19: note = RNA
  misc_feature 20..21: note = DNA
ttgctaccatactctaccatt

SEQ ID NO: 569 - DNA, 21 bp, synthetic construct
  source 1..21: mol_type = other DNA
  modified_base 1: mod_base = OTHER; note = guanosine-3'-phosphate
  modified_base 2: mod_base = OTHER; note = 2'-O-methyluridine-3'-phosphate
  modified_base 3: mod_base = OTHER; note = adenosine-3'-phosphate
  modified_base 4: mod_base = OTHER; note = 2'-O-methyluridine-3'-phosphate
  modified_base 5: mod_base = OTHER; note = guanosine-3'-phosphate
  modified_base 6: mod_base = OTHER; note = guanosine-3'-phosphate
  modified_base 7: mod_base = OTHER; note = 2'-O-methyluridine-3'-phosphate
  modified_base 8: mod_base = OTHER; note = adenosine-3'-phosphate
  modified_base 9: mod_base = OTHER; note = guanosine-3'-phosphate
  modified_base 10: mod_base = OTHER; note = 2'-O-methylcytidine-3'-phosphate
  modified_base 11: mod_base = OTHER; note = adenosine-3'-phosphate
  modified_base 12: mod_base = OTHER; note = adenosine-3'-phosphate
  modified_base 13: mod_base = OTHER; note = 2'-O-methyluridine-3'-phosphate
  modified_base 14: mod_base = OTHER; note = adenosine-3'-phosphate
  modified_base 15: mod_base = OTHER; note = 2'-O-methyluridine-3'-phosphate
  modified_base 16: mod_base = OTHER; note = guanosine-3'-phosphate
  modified_base 17: mod_base = OTHER; note = adenosine-3'-phosphate
  modified_base 18: mod_base = OTHER; note = 2'-O-methylcytidine-3'-phosphate
  modified_base 19: mod_base = OTHER; note = adenosine-3'-phosphate
  modified_base 20: mod_base = OTHER; note = 2'-deoxythymidine-3'-phosphorothioate
  misc_feature 1..19: note = RNA
  misc_feature 20..21: note = DNA
gtatggtagcaatatgacatt

SEQ ID NO: 570 - DNA, 21 bp, synthetic construct
  source 1..21: mol_type = other DNA
  modified_base 1: mod_base = OTHER; note = uridine-3'-phosphate
  modified_base 2: mod_base = OTHER; note = guanosine-3'-phosphate
  modified_base 3: mod_base = OTHER; note = uridine-3'-phosphate
  modified_base 4: mod_base = OTHER; note = 2'-O-methylcytidine-3'-phosphate
  modified_base 5: mod_base = OTHER; note = adenosine-3'-phosphate
  modified_base 6: mod_base = OTHER; note = 2'-O-methyluridine-3'-phosphate
  modified_base 7: mod_base = OTHER; note = adenosine-3'-phosphate
  modified_base 8: mod_base = OTHER; note = uridine-3'-phosphate
  modified_base 9: mod_base = OTHER; note = uridine-3'-phosphate
  modified_base 10: mod_base = OTHER; note = guanosine-3'-phosphate
  modified_base 11: mod_base = OTHER; note = cytidine-3'-phosphate
  modified_base 12: mod_base = OTHER; note = 2'-O-methyluridine-3'-phosphate
  modified_base 13: mod_base = OTHER; note = adenosine-3'-phosphate
  modified_base 14: mod_base = OTHER; note = cytidine-3'-phosphate
  modified_base 15: mod_base = OTHER; note = 2'-O-methylcytidine-3'-phosphate
  modified_base 16: mod_base = OTHER; note = adenosine-3'-phosphate
  modified_base 17: mod_base = OTHER; note = 2'-O-methyluridine-3'-phosphate
  modified_base 18: mod_base = OTHER; note = adenosine-3'-phosphate
  modified_base 19: mod_base = OTHER; note = cytidine-3'-phosphate
  modified_base 20: mod_base = OTHER; note = 2'-deoxythymidine-3'-phosphorothioate
  misc_feature 1..19: note = RNA
  misc_feature 20..21: note = DNA
tgtcatattgctaccatactt

SEQ ID NO: 571 - DNA, 21 bp, synthetic construct
  source 1..21: mol_type = other DNA
  modified_base 1: mod_base = OTHER; note = 2'-O-methyluridine-3'-phosphate
  modified_base 2: mod_base = OTHER; note = guanosine-3'-phosphate
  modified_base 3: mod_base = OTHER; note = guanosine-3'-phosphate
  modified_base 4: mod_base = OTHER; note = 2'-O-methyluridine-3'-phosphate
  modified_base 5: mod_base = OTHER; note = adenosine-3'-phosphate
  modified_base 6: mod_base = OTHER; note = guanosine-3'-phosphate
  modified_base 7: mod_base = OTHER; note = 2'-O-methylcytidine-3'-phosphate
  modified_base 8: mod_base = OTHER; note = adenosine-3'-phosphate
  modified_base 9: mod_base = OTHER; note = adenosine-3'-phosphate
  modified_base 10: mod_base = OTHER; note = 2'-O-methyluridine-3'-phosphate
  modified_base 11: mod_base = OTHER; note = adenosine-3'-phosphate
  modified_base 12: mod_base = OTHER; note = 2'-O-methyluridine-3'-phosphate
  modified_base 13: mod_base = OTHER; note = guanosine-3'-phosphate
  modified_base 14: mod_base = OTHER; note = adenosine-3'-phosphate
  modified_base 15: mod_base = OTHER; note = 2'-O-methylcytidine-3'-phosphate
  modified_base 16: mod_base = OTHER; note = adenosine-3'-phosphate
  modified_base 17: mod_base = OTHER; note = adenosine-3'-phosphate
  modified_base 18: mod_base = OTHER; note = 2'-O-methyluridine-3'-phosphate
  modified_base 19: mod_base = OTHER; note = 2'-O-methyluridine-3'-phosphate
  modified_base 20: mod_base = OTHER; note = 2'-deoxythymidine-3'-phosphorothioate
  misc_feature 1..19: note = RNA
  misc_feature 20..21: note = DNA
tggtagcaatatgacaatttt

SEQ ID NO: 572 - DNA, 21 bp, synthetic construct
  source 1..21: mol_type = other DNA
  modified_base 1: mod_base = OTHER; note = adenosine-3'-phosphate
  modified_base 2: mod_base = OTHER; note = adenosine-3'-phosphate
  modified_base 3: mod_base = OTHER; note = uridine-3'-phosphate
  modified_base 4: mod_base = OTHER; note = uridine-3'-phosphate
  modified_base 5: mod_base = OTHER; note = guanosine-3'-phosphate
  modified_base 6: mod_base = OTHER; note = uridine-3'-phosphate
  modified_base 7: mod_base = OTHER; note = 2'-O-methylcytidine-3'-phosphate
  modified_base 8: mod_base = OTHER; note = adenosine-3'-phosphate
  modified_base 9: mod_base = OTHER; note = 2'-O-methyluridine-3'-phosphate
  modified_base 10: mod_base = OTHER; note = adenosine-3'-phosphate
  modified_base 11: mod_base = OTHER; note = uridine-3'-phosphate
  modified_base 12: mod_base = OTHER; note = uridine-3'-phosphate
  modified_base 13: mod_base = OTHER; note = guanosine-3'-phosphate
  modified_base 14: mod_base = OTHER; note = cytidine-3'-phosphate
  modified_base 15: mod_base = OTHER; note = 2'-O-methyluridine-3'-phosphate
  modified_base 16: mod_base = OTHER; note = adenosine-3'-phosphate
  modified_base 17: mod_base = OTHER; note = cytidine-3'-phosphate
  modified_base 18: mod_base = OTHER; note = 2'-O-methylcytidine-3'-phosphate
  modified_base 19: mod_base = OTHER; note = adenosine-3'-phosphate
  modified_base 20: mod_base = OTHER; note = 2'-deoxythymidine-3'-phosphorothioate
  misc_feature 1..19: note = RNA
  misc_feature 20..21: note = DNA
aattgtcatattgctaccatt

SEQ ID NO: 573 - DNA, 21 bp, synthetic construct
  source 1..21: mol_type = other DNA
  modified_base 1: mod_base = OTHER; note = guanosine-3'-phosphate
  modified_base 2: mod_base = OTHER; note = guanosine-3'-phosphate
  modified_base 3: mod_base = OTHER; note = 2'-O-methyluridine-3'-phosphate
  modified_base 4: mod_base = OTHER; note = adenosine-3'-phosphate
  modified_base 5: mod_base = OTHER; note = guanosine-3'-phosphate
  modified_base 6: mod_base = OTHER; note = 2'-O-methylcytidine-3'-phosphate
  modified_base 7: mod_base = OTHER; note = adenosine-3'-phosphate
  modified_base 8: mod_base = OTHER; note = adenosine-3'-phosphate
  modified_base 9: mod_base = OTHER; note = 2'-O-methyluridine-3'-phosphate
  modified_base 10: mod_base = OTHER; note = adenosine-3'-phosphate
  modified_base 11: mod_base = OTHER; note = 2'-O-methyluridine-3'-phosphate
  modified_base 12: mod_base = OTHER; note = guanosine-3'-phosphate
  modified_base 13: mod_base = OTHER; note = adenosine-3'-phosphate
  modified_base 14: mod_base = OTHER; note = 2'-O-methylcytidine-3'-phosphate
  modified_base 15: mod_base = OTHER; note = adenosine-3'-phosphate
  modified_base 16: mod_base = OTHER; note = adenosine-3'-phosphate
  modified_base 17: mod_base = OTHER; note = 2'-O-methyluridine-3'-phosphate
  modified_base 18: mod_base = OTHER; note = 2'-O-methyluridine-3'-phosphate
  modified_base 19: mod_base = OTHER; note = guanosine-3'-phosphate
  modified_base 20: mod_base = OTHER; note = 2'-deoxythymidine-3'-phosphorothioate
  misc_feature 1..19: note = RNA
  misc_feature 20..21: note = DNA
ggtagcaatatgacaattgtt

SEQ ID NO: 574 - DNA, 21 bp, synthetic construct
  source 1..21: mol_type = other DNA
  modified_base 1: mod_base = OTHER; note = 2'-O-methylcytidine-3'-phosphate
  modified_base 2: mod_base = OTHER; note = adenosine-3'-phosphate
  modified_base 3: mod_base = OTHER; note = adenosine-3'-phosphate
  modified_base 4: mod_base = OTHER; note = uridine-3'-phosphate
  modified_base 5: mod_base = OTHER; note = uridine-3'-phosphate
  modified_base 6: mod_base = OTHER; note = guanosine-3'-phosphate
  modified_base 7: mod_base = OTHER; note = uridine-3'-phosphate
  modified_base 8: mod_base = OTHER; note = 2'-O-methylcytidine-3'-phosphate
  modified_base 9: mod_base = OTHER; note = adenosine-3'-phosphate
  modified_base 10: mod_base = OTHER; note = 2'-O-methyluridine-3'-phosphate
  modified_base 11: mod_base = OTHER; note = adenosine-3'-phosphate
  modified_base 12: mod_base = OTHER; note = uridine-3'-phosphate
  modified_base 13: mod_base = OTHER; note = uridine-3'-phosphate
  modified_base 14: mod_base = OTHER; note = guanosine-3'-phosphate
  modified_base 15: mod_base = OTHER; note = cytidine-3'-phosphate
  modified_base 16: mod_base = OTHER; note = 2'-O-methyluridine-3'-phosphate
  modified_base 17: mod_base = OTHER; note = adenosine-3'-phosphate
  modified_base 18: mod_base = OTHER; note = cytidine-3'-phosphate
  modified_base 19: mod_base = OTHER; note = cytidine-3'-phosphate
  modified_base 20: mod_base = OTHER; note = 2'-deoxythymidine-3'-phosphorothioate
  misc_feature 1..19: note = RNA
  misc_feature 20..21: note = DNA
caattgtcatattgctacctt

SEQ ID NO: 575 - DNA, 21 bp, synthetic construct
  source 1..21: mol_type = other DNA
  modified_base 1: mod_base = OTHER; note = adenosine-3'-phosphate
  modified_base 2: mod_base = OTHER; note = guanosine-3'-phosphate
  modified_base 3: mod_base = OTHER; note = 2'-O-methylcytidine-3'-phosphate
  modified_base 4: mod_base = OTHER; note = adenosine-3'-phosphate
  modified_base 5: mod_base = OTHER; note = adenosine-3'-phosphate
  modified_base 6: mod_base = OTHER; note = 2'-O-methyluridine-3'-phosphate
  modified_base 7: mod_base = OTHER; note = adenosine-3'-phosphate
  modified_base 8: mod_base = OTHER; note = 2'-O-methyluridine-3'-phosphate
  modified_base 9: mod_base = OTHER; note = guanosine-3'-phosphate
  modified_base 10: mod_base = OTHER; note = adenosine-3'-phosphate
  modified_base 11: mod_base = OTHER; note = 2'-O-methylcytidine-3'-phosphate
  modified_base 12: mod_base = OTHER; note = adenosine-3'-phosphate
  modified_base 13: mod_base = OTHER; note = adenosine-3'-phosphate
  modified_base 14: mod_base = OTHER; note = 2'-O-methyluridine-3'-phosphate
  modified_base 15: mod_base = OTHER; note = 2'-O-methyluridine-3'-phosphate
  modified_base 16: mod_base = OTHER; note = guanosine-3'-phosphate
  modified_base 17: mod_base = OTHER; note = adenosine-3'-phosphate
  modified_base 18: mod_base = OTHER; note = adenosine-3'-phosphate
  modified_base 19: mod_base = OTHER; note = 2'-O-methyluridine-3'-phosphate
  modified_base 20: mod_base = OTHER; note = 2'-deoxythymidine-3'-phosphorothioate
  misc_feature 1..19: note = RNA
  misc_feature 20..21: note = DNA
agcaatatgacaattgaattt

SEQ ID NO: 576 - DNA, 21 bp, synthetic construct
  source 1..21: mol_type = other DNA
  modified_base 1: mod_base = OTHER; note = adenosine-3'-phosphate
  modified_base 2: mod_base = OTHER; note = uridine-3'-phosphate
  modified_base 3: mod_base = OTHER; note = uridine-3'-phosphate
  modified_base 4: mod_base = OTHER; note = 2'-O-methylcytidine-3'-phosphate
  modified_base 5: mod_base = OTHER; note = adenosine-3'-phosphate
  modified_base 6: mod_base = OTHER; note = adenosine-3'-phosphate
  modified_base 7: mod_base = OTHER; note = uridine-3'-phosphate
  modified_base 8: mod_base = OTHER; note = uridine-3'-phosphate
  modified_base 9: mod_base = OTHER; note = guanosine-3'-phosphate
  modified_base 10: mod_base = OTHER; note = uridine-3'-phosphate
  modified_base 11: mod_base = OTHER; note = 2'-O-methylcytidine-3'-phosphate
  modified_base 12: mod_base = OTHER; note = adenosine-3'-phosphate
  modified_base 13: mod_base = OTHER; note = 2'-O-methyluridine-3'-phosphate
  modified_base 14: mod_base = OTHER; note = adenosine-3'-phosphate
  modified_base 15: mod_base = OTHER; note = uridine-3'-phosphate
  modified_base 16: mod_base = OTHER; note = uridine-3'-phosphate
  modified_base 17: mod_base = OTHER; note = guanosine-3'-phosphate
  modified_base 18: mod_base = OTHER; note = cytidine-3'-phosphate
  modified_base 19: mod_base = OTHER; note = uridine-3'-phosphate
  modified_base 20: mod_base = OTHER; note = 2'-deoxythymidine-3'-phosphorothioate
  misc_feature 1..19: note = RNA
  misc_feature 20..21: note = DNA
attcaattgtcatattgcttt

SEQ ID NO: 577 - DNA, 21 bp, synthetic construct
  source 1..21: mol_type = other DNA
  modified_base 1: mod_base = OTHER; note = 2'-O-methylcytidine-3'-phosphate
  modified_base 2: mod_base = OTHER; note = adenosine-3'-phosphate
  modified_base 3: mod_base = OTHER; note = adenosine-3'-phosphate
  modified_base 4: mod_base = OTHER; note = 2'-O-methyluridine-3'-phosphate
  modified_base 5: mod_base = OTHER; note = adenosine-3'-phosphate
  modified_base 6: mod_base = OTHER; note = 2'-O-methyluridine-3'-phosphate
  modified_base 7: mod_base = OTHER; note = guanosine-3'-phosphate
  modified_base 8: mod_base = OTHER; note = adenosine-3'-phosphate
  modified_base 9: mod_base = OTHER; note = 2'-O-methylcytidine-3'-phosphate
  modified_base 10: mod_base = OTHER; note = adenosine-3'-phosphate
  modified_base 11: mod_base = OTHER; note = adenosine-3'-phosphate
  modified_base 12: mod_base = OTHER; note = 2'-O-methyluridine-3'-phosphate
  modified_base 13: mod_base = OTHER; note = 2'-O-methyluridine-3'-phosphate
  modified_base 14: mod_base = OTHER; note = guanosine-3'-phosphate
  modified_base 15: mod_base = OTHER; note = adenosine-3'-phosphate
  modified_base 16: mod_base = OTHER; note = adenosine-3'-phosphate
  modified_base 17: mod_base = OTHER; note = 2'-O-methyluridine-3'-phosphate
  modified_base 18: mod_base = OTHER; note = guanosine-3'-phosphate
  modified_base 19: mod_base = OTHER; note = 2'-O-methylcytidine-3'-phosphate
  modified_base 20: mod_base = OTHER; note = 2'-deoxythymidine-3'-phosphorothioate
  misc_feature 1..19: note = RNA
  misc_feature 20..21: note = DNA
caatatgacaattgaatgctt

SEQ ID NO: 578 - DNA, 21 bp, synthetic construct
  source 1..21: mol_type = other DNA
  modified_base 1: mod_base = OTHER; note = guanosine-3'-phosphate
  modified_base 2: mod_base = OTHER; note = 2'-O-methylcytidine-3'-phosphate
  modified_base 3: mod_base = OTHER; note = adenosine-3'-phosphate
  modified_base 4: mod_base = OTHER; note = uridine-3'-phosphate
  modified_base 5: mod_base = OTHER; note = uridine-3'-phosphate
  modified_base 6: mod_base = OTHER; note = 2'-O-methylcytidine-3'-phosphate
  modified_base 7: mod_base = OTHER; note = adenosine-3'-phosphate
  modified_base 8: mod_base = OTHER; note = adenosine-3'-phosphate
  modified_base 9: mod_base = OTHER; note = uridine-3'-phosphate
  modified_base 10: mod_base = OTHER; note = uridine-3'-phosphate
  modified_base 11: mod_base = OTHER; note = guanosine-3'-phosphate
  modified_base 12: mod_base = OTHER; note = uridine-3'-phosphate
  modified_base 13: mod_base = OTHER; note = 2'-O-methylcytidine-3'-phosphate
  modified_base 14: mod_base = OTHER; note = adenosine-3'-phosphate
  modified_base 15: mod_base = OTHER; note = 2'-O-methyluridine-3'-phosphate
  modified_base 16: mod_base = OTHER; note = adenosine-3'-phosphate
  modified_base 17: mod_base = OTHER; note = uridine-3'-phosphate
  modified_base 18: mod_base = OTHER; note = uridine-3'-phosphate
  modified_base 19: mod_base = OTHER; note = guanosine-3'-phosphate
  modified_base 20: mod_base = OTHER; note = 2'-deoxythymidine-3'-phosphorothioate
  misc_feature 1..19: note = RNA
  misc_feature 20..21: note = DNA
gcattcaattgtcatattgtt

SEQ ID NO: 579 - DNA, 21 bp, synthetic construct
  source 1..21: mol_type = other DNA
  modified_base 1: mod_base = OTHER; note = adenosine-3'-phosphate
  modified_base 2: mod_base = OTHER; note = adenosine-3'-phosphate
  modified_base 3: mod_base = OTHER; note = 2'-O-methyluridine-3'-phosphate
  modified_base 4: mod_base = OTHER; note = adenosine-3'-phosphate
  modified_base 5: mod_base = OTHER; note = 2'-O-methyluridine-3'-phosphate
  modified_base 6: mod_base = OTHER; note = guanosine-3'-phosphate
  modified_base 7: mod_base = OTHER; note = adenosine-3'-phosphate
  modified_base 8: mod_base = OTHER; note = 2'-O-methylcytidine-3'-phosphate
  modified_base 9: mod_base = OTHER; note = adenosine-3'-phosphate
  modified_base 10: mod_base = OTHER; note = adenosine-3'-phosphate
  modified_base 11: mod_base = OTHER; note = 2'-O-methyluridine-3'-phosphate
  modified_base 12: mod_base = OTHER; note = 2'-O-methyluridine-3'-phosphate
  modified_base 13: mod_base = OTHER; note = guanosine-3'-phosphate
  modified_base 14: mod_base = OTHER; note = adenosine-3'-phosphate
  modified_base 15: mod_base = OTHER; note = adenosine-3'-phosphate
  modified_base 16: mod_base = OTHER; note = 2'-O-methyluridine-3'-phosphate
  modified_base 17: mod_base = OTHER; note = guanosine-3'-phosphate
  modified_base 18: mod_base = OTHER; note = 2'-O-methylcytidine-3'-phosphate
  modified_base 19: mod_base = OTHER; note = adenosine-3'-phosphate
  modified_base 20: mod_base = OTHER; note = 2'-deoxythymidine-3'-phosphorothioate
  misc_feature 1..19: note = RNA
  misc_feature 20..21: note = DNA
aatatgacaattgaatgcatt

SEQ ID NO: 580 - DNA, 21 bp, synthetic construct
  source 1..21: mol_type = other DNA
  modified_base 1: mod_base = OTHER; note = uridine-3'-phosphate
  modified_base 2: mod_base = OTHER; note = guanosine-3'-phosphate
  modified_base 3: mod_base = OTHER; note = 2'-O-methylcytidine-3'-phosphate
  modified_base 4: mod_base = OTHER; note = adenosine-3'-phosphate
  modified_base 5: mod_base = OTHER; note = uridine-3'-phosphate
  modified_base 6: mod_base = OTHER; note = uridine-3'-phosphate
  modified_base 7: mod_base = OTHER; note = 2'-O-methylcytidine-3'-phosphate
  modified_base 8: mod_base = OTHER; note = adenosine-3'-phosphate
  modified_base 9: mod_base = OTHER; note = adenosine-3'-phosphate
  modified_base 10: mod_base = OTHER; note = uridine-3'-phosphate
  modified_base 11: mod_base = OTHER; note = uridine-3'-phosphate
  modified_base 12: mod_base = OTHER; note = guanosine-3'-phosphate
  modified_base 13: mod_base = OTHER; note = uridine-3'-phosphate
  modified_base 14: mod_base = OTHER; note = 2'-O-methylcytidine-3'-phosphate
  modified_base 15: mod_base = OTHER; note = adenosine-3'-phosphate
  modified_base 16: mod_base = OTHER; note = 2'-O-methyluridine-3'-phosphate
  modified_base 17: mod_base = OTHER; note = adenosine-3'-phosphate
  modified_base 18: mod_base = OTHER; note = uridine-3'-phosphate
  modified_base 19: mod_base = OTHER; note = uridine-3'-phosphate
  modified_base 20: mod_base = OTHER; note = 2'-deoxythymidine-3'-phosphorothioate
  misc_feature 1..19: note = RNA
  misc_feature 20..21: note = DNA
tgcattcaattgtcatatttt

SEQ ID NO: 581 - DNA, 21 bp, synthetic construct
  source 1..21: mol_type = other DNA
  modified_base 1: mod_base = OTHER; note = adenosine-3'-phosphate
  modified_base 2: mod_base = OTHER; note = 2'-O-methyluridine-3'-phosphate
  modified_base 3: mod_base = OTHER; note = adenosine-3'-phosphate
  modified_base 4: mod_base = OTHER; note = 2'-O-methyluridine-3'-phosphate
  modified_base 5: mod_base = OTHER; note = guanosine-3'-phosphate
  modified_base 6: mod_base = OTHER; note = adenosine-3'-phosphate
  modified_base 7: mod_base = OTHER; note = 2'-O-methylcytidine-3'-phosphate
  modified_base 8: mod_base = OTHER; note = adenosine-3'-phosphate
  modified_base 9: mod_base = OTHER; note = adenosine-3'-phosphate
  modified_base 10: mod_base = OTHER; note = 2'-O-methyluridine-3'-phosphate
  modified_base 11: mod_base = OTHER; note = 2'-O-methyluridine-3'-phosphate
  modified_base 12: mod_base = OTHER; note = guanosine-3'-phosphate
  modified_base 13: mod_base = OTHER; note = adenosine-3'-phosphate
  modified_base 14: mod_base = OTHER; note = adenosine-3'-phosphate
  modified_base 15: mod_base = OTHER; note = 2'-O-methyluridine-3'-phosphate
  modified_base 16: mod_base = OTHER; note = guanosine-3'-phosphate
  modified_base 17: mod_base = OTHER; note = 2'-O-methylcytidine-3'-phosphate
  modified_base 18: mod_base = OTHER; note = adenosine-3'-phosphate
  modified_base 19: mod_base = OTHER; note = adenosine-3'-phosphate
  modified_base 20: mod_base = OTHER; note = 2'-deoxythymidine-3'-phosphorothioate
  misc_feature 1..19: note = RNA
  misc_feature 20..21: note = DNA
atatgacaattgaatgcaatt

SEQ ID NO: 582 - DNA, 21 bp, synthetic construct
  source 1..21: mol_type = other DNA
  modified_base 1: mod_base = OTHER; note = uridine-3'-phosphate
  modified_base 2: mod_base = OTHER; note = uridine-3'-phosphate
  modified_base 3: mod_base = OTHER; note = guanosine-3'-phosphate
  modified_base 4: mod_base = OTHER; note = 2'-O-methylcytidine-3'-phosphate
  modified_base 5: mod_base = OTHER; note = adenosine-3'-phosphate
  modified_base 6: mod_base = OTHER; note = uridine-3'-phosphate
  modified_base 7: mod_base = OTHER; note = uridine-3'-phosphate
  modified_base 8: mod_base = OTHER; note = 2'-O-methylcytidine-3'-phosphate
  modified_base 9: mod_base = OTHER; note = adenosine-3'-phosphate
  modified_base 10: mod_base = OTHER; note = adenosine-3'-phosphate
  modified_base 11: mod_base = OTHER; note = uridine-3'-phosphate
  modified_base 12: mod_base = OTHER; note = uridine-3'-phosphate
  modified_base 13: mod_base = OTHER; note = guanosine-3'-phosphate
  modified_base 14: mod_base = OTHER; note = uridine-3'-phosphate
  modified_base 15: mod_base = OTHER; note = 2'-O-methylcytidine-3'-phosphate
  modified_base 16: mod_base = OTHER; note = adenosine-3'-phosphate
  modified_base 17: mod_base = OTHER; note = 2'-O-methyluridine-3'-phosphate
  modified_base 18: mod_base = OTHER; note = adenosine-3'-phosphate
  modified_base 19: mod_base = OTHER; note = uridine-3'-phosphate
  modified_base 20: mod_base = OTHER; note = 2'-deoxythymidine-3'-phosphorothioate
  misc_feature 1..19: note = RNA
  misc_feature 20..21: note = DNA
ttgcattcaattgtcatattt

SEQ ID NO: 583 - DNA, 21 bp, synthetic construct
  source 1..21: mol_type = other DNA
  modified_base 1: mod_base = OTHER; note = 2'-O-methylcytidine-3'-phosphate
  modified_base 2: mod_base = OTHER; note = adenosine-3'-phosphate
  modified_base 3: mod_base = OTHER; note = adenosine-3'-phosphate
  modified_base 4: mod_base = OTHER; note = 2'-O-methyluridine-3'-phosphate
  modified_base 5: mod_base = OTHER; note = 2'-O-methyluridine-3'-phosphate
  modified_base 6: mod_base = OTHER; note = guanosine-3'-phosphate
  modified_base 7: mod_base = OTHER; note = adenosine-3'-phosphate
  modified_base 8: mod_base = OTHER; note = adenosine-3'-phosphate
  modified_base 9: mod_base = OTHER; note = 2'-O-methyluridine-3'-phosphate
  modified_base 10: mod_base = OTHER; note = guanosine-3'-phosphate
  modified_base 11: mod_base = OTHER; note = 2'-O-methylcytidine-3'-phosphate
  modified_base 12: mod_base = OTHER; note = adenosine-3'-phosphate
  modified_base 13: mod_base = OTHER; note = adenosine-3'-phosphate
  modified_base 14: mod_base = OTHER; note = adenosine-3'-phosphate
  modified_base 15: mod_base = OTHER; note = 2'-O-methyluridine-3'-phosphate
  modified_base 16: mod_base = OTHER; note = 2'-O-methyluridine-3'-phosphate
  modified_base 17: mod_base = OTHER; note = 2'-O-methylcytidine-3'-phosphate
  modified_base 18: mod_base = OTHER; note = 2'-O-methylcytidine-3'-phosphate
  modified_base 19: mod_base = OTHER; note = 2'-O-methylcytidine-3'-phosphate
  modified_base 20: mod_base = OTHER; note = 2'-deoxythymidine-3'-phosphorothioate
  misc_feature 1..19: note = RNA
  misc_feature 20..21: note = DNA
caattgaatgcaaattccctt

SEQ ID NO: 584 - DNA, 21 bp, synthetic construct
  source 1..21: mol_type = other DNA
  modified_base 1: mod_base = OTHER; note = guanosine-3'-phosphate
  modified_base 2: mod_base = OTHER; note = guanosine-3'-phosphate
  modified_base 3: mod_base = OTHER; note = guanosine-3'-phosphate
  modified_base 4: mod_base = OTHER; note = adenosine-3'-phosphate
  modified_base 5: mod_base = OTHER; note = adenosine-3'-phosphate
  modified_base 6: mod_base = OTHER; note = uridine-3'-phosphate
  modified_base 7: mod_base = OTHER; note = uridine-3'-phosphate
  modified_base 8: mod_base = OTHER; note = uridine-3'-phosphate
  modified_base 9: mod_base = OTHER; note = guanosine-3'-phosphate
  modified_base 10: mod_base = OTHER; note = 2'-O-methylcytidine-3'-phosphate
  modified_base 11: mod_base = OTHER; note = adenosine-3'-phosphate
  modified_base 12: mod_base = OTHER; note = uridine-3'-phosphate
  modified_base 13: mod_base = OTHER; note = uridine-3'-phosphate
  modified_base 14: mod_base = OTHER; note = 2'-O-methylcytidine-3'-phosphate
  modified_base 15: mod_base = OTHER; note = adenosine-3'-phosphate
  modified_base 16: mod_base = OTHER; note = adenosine-3'-phosphate
  modified_base 17: mod_base = OTHER; note = uridine-3'-phosphate
  modified_base 18: mod_base = OTHER; note = uridine-3'-phosphate
  modified_base 19: mod_base = OTHER; note = guanosine-3'-phosphate
  modified_base 20: mod_base = OTHER; note = 2'-deoxythymidine-3'-phosphorothioate
  misc_feature 1..19: note = RNA
  misc_feature 20..21: note = DNA
gggaatttgcattcaattgtt

SEQ ID NO: 585 - DNA, 21 bp, synthetic construct
  source 1..21: mol_type = other DNA
  modified_base 1: mod_base = OTHER; note = 2'-O-methyluridine-3'-phosphate
  modified_base 2: mod_base = OTHER; note = guanosine-3'-phosphate
  modified_base 3: mod_base = OTHER; note = adenosine-3'-phosphate
  modified_base 4: mod_base = OTHER; note = adenosine-3'-phosphate
  modified_base 5: mod_base = OTHER; note = 2'-O-methyluridine-3'-phosphate
  modified_base 6: mod_base = OTHER; note = guanosine-3'-phosphate
  modified_base 7: mod_base = OTHER; note = 2'-O-methylcytidine-3'-phosphate
  modified_base 8: mod_base = OTHER; note = adenosine-3'-phosphate
  modified_base 9: mod_base = OTHER; note = adenosine-3'-phosphate
  modified_base 10: mod_base = OTHER; note = adenosine-3'-phosphate
  modified_base 11: mod_base = OTHER; note = 2'-O-methyluridine-3'-phosphate
  modified_base 12: mod_base = OTHER; note = 2'-O-methyluridine-3'-phosphate
  modified_base 13: mod_base = OTHER; note = 2'-O-methylcytidine-3'-phosphate
  modified_base 14: mod_base = OTHER; note = 2'-O-methylcytidine-3'-phosphate
  modified_base 15: mod_base = OTHER; note = 2'-O-methylcytidine-3'-phosphate
  modified_base 16: mod_base = OTHER; note = adenosine-3'-phosphate
  modified_base 17: mod_base = OTHER; note = guanosine-3'-phosphate
  modified_base 18: mod_base = OTHER; note = 2'-O-methyluridine-3'-phosphate
  modified_base 19: mod_base = OTHER; note = adenosine-3'-phosphate
  modified_base 20: mod_base = OTHER; note = 2'-deoxythymidine-3'-phosphorothioate
  misc_feature 1..19: note = RNA
  misc_feature 20..21: note = DNA
tgaatgcaaattcccagtatt

SEQ ID NO: 586 - DNA, 21 bp, synthetic construct
  source 1..21: mol_type = other DNA
  modified_base 1: mod_base = OTHER; note = 2'-O-methyluridine-3'-phosphate
  modified_base 2: mod_base = OTHER; note = adenosine-3'-phosphate
  modified_base 3: mod_base = OTHER; note = cytidine-3'-phosphate
  modified_base 4: mod_base = OTHER; note = uridine-3'-phosphate
  modified_base 5: mod_base = OTHER; note = guanosine-3'-phosphate
  modified_base 6: mod_base = OTHER; note = guanosine-3'-phosphate
  modified_base 7: mod_base = OTHER; note = guanosine-3'-phosphate
  modified_base 8: mod_base = OTHER; note = adenosine-3'-phosphate
  modified_base 9: mod_base = OTHER; note = adenosine-3'-phosphate
  modified_base 10: mod_base = OTHER; note = uridine-3'-phosphate
  modified_base 11: mod_base = OTHER; note = uridine-3'-phosphate
  modified_base 12: mod_base = OTHER; note = uridine-3'-phosphate
  modified_base 13: mod_base = OTHER; note = guanosine-3'-phosphate
  modified_base 14: mod_base = OTHER; note = 2'-O-methylcytidine-3'-phosphate
  modified_base 15: mod_base = OTHER; note = adenosine-3'-phosphate
  modified_base 16: mod_base = OTHER; note = uridine-3'-phosphate
  modified_base 17: mod_base = OTHER; note = uridine-3'-phosphate
  modified_base 18: mod_base = OTHER; note = 2'-O-methylcytidine-3'-phosphate
  modified_base 19: mod_base = OTHER; note = adenosine-3'-phosphate
  modified_base 20: mod_base = OTHER; note = 2'-deoxythymidine-3'-phosphorothioate
  misc_feature 1..19: note = RNA
  misc_feature 20..21: note = DNA
tactgggaatttgcattcatt

SEQ ID NO: 587 - DNA, 21 bp, synthetic construct
  source 1..21: mol_type = other DNA
  modified_base 1: mod_base = OTHER; note = adenosine-3'-phosphate
  modified_base 2: mod_base = OTHER; note = adenosine-3'-phosphate
  modified_base 3: mod_base = OTHER; note = 2'-O-methyluridine-3'-phosphate
  modified_base 4: mod_base = OTHER; note = guanosine-3'-phosphate
  modified_base 5: mod_base = OTHER; note = 2'-O-methylcytidine-3'-phosphate
  modified_base 6: mod_base = OTHER; note = adenosine-3'-phosphate
  modified_base 7: mod_base = OTHER; note = adenosine-3'-phosphate
  modified_base 8: mod_base = OTHER; note = adenosine-3'-phosphate
  modified_base 9: mod_base = OTHER; note = 2'-O-methyluridine-3'-phosphate
  modified_base 10: mod_base = OTHER; note = 2'-O-methyluridine-3'-phosphate
  modified_base 11: mod_base = OTHER; note = 2'-O-methylcytidine-3'-phosphate
  modified_base 12: mod_base = OTHER; note = 2'-O-methylcytidine-3'-phosphate
  modified_base 13: mod_base = OTHER; note = 2'-O-methylcytidine-3'-phosphate
  modified_base 14: mod_base = OTHER; note = adenosine-3'-phosphate
  modified_base 15: mod_base = OTHER; note = guanosine-3'-phosphate
  modified_base 16: mod_base = OTHER; note = 2'-O-methyluridine-3'-phosphate
  modified_base 17: mod_base = OTHER; note = adenosine-3'-phosphate
  modified_base 18: mod_base = OTHER; note = guanosine-3'-phosphate
  modified_base 19: mod_base = OTHER; note = adenosine-3'-phosphate
  modified_base 20: mod_base = OTHER; note = 2'-deoxythymidine-3'-phosphorothioate
  misc_feature 1..19: note = RNA
  misc_feature 20..21: note = DNA
aatgcaaattcccagtagatt

SEQ ID NO: 588 - DNA, 21 bp, synthetic construct
  source 1..21: mol_type = other DNA
  modified_base 1: mod_base = OTHER; note = uridine-3'-phosphate
  modified_base 2: mod_base = OTHER; note = cytidine-3'-phosphate
  modified_base 3: mod_base = OTHER; note = 2'-O-methyluridine-3'-phosphate
  modified_base 4: mod_base = OTHER; note = adenosine-3'-phosphate
  modified_base 5: mod_base = OTHER; note = cytidine-3'-phosphate
  modified_base 6: mod_base = OTHER; note = uridine-3'-phosphate
  modified_base 7: mod_base = OTHER; note = guanosine-3'-phosphate
  modified_base 8: mod_base = OTHER; note = guanosine-3'-phosphate
  modified_base 9: mod_base = OTHER; note = guanosine-3'-phosphate
  modified_base 10: mod_base = OTHER; note = adenosine-3'-phosphate
  modified_base 11: mod_base = OTHER; note = adenosine-3'-phosphate
  modified_base 12: mod_base = OTHER; note = uridine-3'-phosphate
  modified_base 13: mod_base = OTHER; note = uridine-3'-phosphate
  modified_base 14: mod_base = OTHER; note = uridine-3'-phosphate
  modified_base 15: mod_base = OTHER; note = guanosine-3'-phosphate
  modified_base 16: mod_base = OTHER; note = 2'-O-methylcytidine-3'-phosphate
  modified_base 17: mod_base = OTHER; note = adenosine-3'-phosphate
  modified_base 18: mod_base = OTHER; note = uridine-3'-phosphate
  modified_base 19: mod_base = OTHER; note = uridine-3'-phosphate
  modified_base 20: mod_base = OTHER; note = 2'-deoxythymidine-3'-phosphorothioate
  misc_feature 1..19: note = RNA
  misc_feature 20..21: note = DNA
tctactgggaatttgcatttt

SEQ ID NO: 589 - DNA, 21 bp, synthetic construct
  source 1..21: mol_type = other DNA
  modified_base 1: mod_base = OTHER; note = adenosine-3'-phosphate
  modified_base 2: mod_base = OTHER; note = adenosine-3'-phosphate
  modified_base 3: mod_base = OTHER; note = adenosine-3'-phosphate
  modified_base 4: mod_base = OTHER; note = adenosine-3'-phosphate
  modified_base 5: mod_base = OTHER; note = 2'-O-methylcytidine-3'-phosphate
  modified_base 6: mod_base = OTHER; note = adenosine-3'-phosphate
  modified_base 7: mod_base = OTHER; note = adenosine-3'-phosphate
  modified_base 8: mod_base = OTHER; note = 2'-O-methyluridine-3'-phosphate
  modified_base 9: mod_base = OTHER; note = 2'-O-methyluridine-3'-phosphate
  modified_base 10: mod_base = OTHER; note = adenosine-3'-phosphate
  modified_base 11: mod_base = OTHER; note = guanosine-3'-phosphate
  modified_base 12: mod_base = OTHER; note = adenosine-3'-phosphate
  modified_base 13: mod_base = OTHER; note = 2'-O-methylcytidine-3'-phosphate
  modified_base 14: mod_base = OTHER; note = 2'-O-methylcytidine-3'-phosphate
  modified_base 15: mod_base = OTHER; note = 2'-O-methyluridine-3'-phosphate
  modified_base 16: mod_base = OTHER; note = guanosine-3'-phosphate
  modified_base 17: mod_base = OTHER; note = guanosine-3'-phosphate
  modified_base 18: mod_base = OTHER; note = 2'-O-methylcytidine-3'-phosphate
  modified_base 19: mod_base = OTHER; note = 2'-O-methyluridine-3'-phosphate
  modified_base 20: mod_base = OTHER; note = 2'-deoxythymidine-3'-phosphorothioate
  misc_feature 1..19: note = RNA
  misc_feature 20..21: note = DNA
aaaacaattagacctggcttt

SEQ ID NO: 590 - DNA, 21 bp, synthetic construct
  source 1..21: mol_type = other DNA
  modified_base 1: mod_base = OTHER; note = adenosine-3'-phosphate
  modified_base 2: mod_base = OTHER; note = guanosine-3'-phosphate
  modified_base 3: mod_base = OTHER; note = cytidine-3'-phosphate
  modified_base 4: mod_base = OTHER; note = 2'-O-methylcytidine-3'-phosphate
  modified_base 5: mod_base = OTHER; note = adenosine-3'-phosphate
  modified_base 6: mod_base = OTHER; note = guanosine-3'-phosphate
  modified_base 7: mod_base = OTHER; note = guanosine-3'-phosphate
  modified_base 8: mod_base = OTHER; note = uridine-3'-phosphate
  modified_base 9: mod_base = OTHER; note = cytidine-3'-phosphate
  modified_base 10: mod_base = OTHER; note = 2'-O-methyluridine-3'-phosphate
  modified_base 11: mod_base = OTHER; note = adenosine-3'-phosphate
  modified_base 12: mod_base = OTHER; note = adenosine-3'-phosphate
  modified_base 13: mod_base = OTHER; note = uridine-3'-phosphate
  modified_base 14: mod_base = OTHER; note = uridine-3'-phosphate
  modified_base 15: mod_base = OTHER; note = guanosine-3'-phosphate
  modified_base 16: mod_base = OTHER; note = uridine-3'-phosphate
  modified_base 17: mod_base = OTHER; note = uridine-3'-phosphate
  modified_base 18: mod_base = OTHER; note = uridine-3'-phosphate
  modified_base 19: mod_base = OTHER; note = uridine-3'-phosphate
  modified_base 20: mod_base = OTHER; note = 2'-deoxythymidine-3'-phosphorothioate
  misc_feature 1..19: note = RNA
  misc_feature 20..21: note = DNA
agccaggtctaattgtttttt

SEQ ID NO: 591 - DNA, 21 bp, synthetic construct
  source 1..21: mol_type = other DNA
  modified_base 1: mod_base = OTHER; note = adenosine-3'-phosphate
  modified_base 2: mod_base = OTHER; note = adenosine-3'-phosphate
  modified_base 3: mod_base = OTHER; note = adenosine-3'-phosphate
  modified_base 4: mod_base = OTHER; note = 2'-O-methylcytidine-3'-phosphate
  modified_base 5: mod_base = OTHER; note = adenosine-3'-phosphate
  modified_base 6: mod_base = OTHER; note = adenosine-3'-phosphate
  modified_base 7: mod_base = OTHER; note = 2'-O-methyluridine-3'-phosphate
  modified_base 8: mod_base = OTHER; note = 2'-O-methyluridine-3'-phosphate
  modified_base 9: mod_base = OTHER; note = adenosine-3'-phosphate
  modified_base 10: mod_base = OTHER; note = guanosine-3'-phosphate
  modified_base 11: mod_base = OTHER; note = adenosine-3'-phosphate
  modified_base 12: mod_base = OTHER; note = 2'-O-methylcytidine-3'-phosphate
  modified_base 13: mod_base = OTHER; note = 2'-O-methylcytidine-3'-phosphate
  modified_base 14: mod_base = OTHER; note = 2'-O-methyluridine-3'-phosphate
  modified_base 15: mod_base = OTHER; note = guanosine-3'-phosphate
  modified_base 16: mod_base = OTHER; note = guanosine-3'-phosphate
  modified_base 17: mod_base = OTHER; note = 2'-O-methylcytidine-3'-phosphate
  modified_base 18: mod_base = OTHER; note = 2'-O-methyluridine-3'-phosphate
  modified_base 19: mod_base = OTHER; note = guanosine-3'-phosphate
  modified_base 20: mod_base = OTHER; note = 2'-deoxythymidine-3'-phosphorothioate
  misc_feature 1..19: note = RNA
  misc_feature 20..21: note = DNA
aaacaattagacctggctgtt

SEQ ID NO: 592 - DNA, 21 bp, synthetic construct
  source 1..21: mol_type = other DNA
  modified_base 1: mod_base = OTHER; note = 2'-O-methylcytidine-3'-phosphate
  modified_base 2: mod_base = OTHER; note = adenosine-3'-phosphate
  modified_base 3: mod_base = OTHER; note = guanosine-3'-phosphate
  modified_base 4: mod_base = OTHER; note = cytidine-3'-phosphate
  modified_base 5: mod_base = OTHER; note = 2'-O-methylcytidine-3'-phosphate
  modified_base 6: mod_base = OTHER; note = adenosine-3'-phosphate
  modified_base 7: mod_base = OTHER; note = guanosine-3'-phosphate
  modified_base 8: mod_base = OTHER; note = guanosine-3'-phosphate
  modified_base 9: mod_base = OTHER; note = uridine-3'-phosphate
  modified_base 10: mod_base = OTHER; note = cytidine-3'-phosphate
  modified_base 11: mod_base = OTHER; note = 2'-O-methyluridine-3'-phosphate
  modified_base 12: mod_base = OTHER; note = adenosine-3'-phosphate
  modified_base 13: mod_base = OTHER; note = adenosine-3'-phosphate
  modified_base 14: mod_base = OTHER; note = uridine-3'-phosphate
  modified_base 15: mod_base = OTHER; note = uridine-3'-phosphate
  modified_base 16: mod_base = OTHER; note = guanosine-3'-phosphate
  modified_base 17: mod_base = OTHER; note = uridine-3'-phosphate
  modified_base 18: mod_base = OTHER; note = uridine-3'-phosphate
  modified_base 19: mod_base = OTHER; note = uridine-3'-phosphate
  modified_base 20: mod_base = OTHER; note = 2'-deoxythymidine-3'-phosphorothioate
  misc_feature 1..19: note = RNA
  misc_feature 20..21: note = DNA
cagccaggtctaattgttttt

SEQ ID NO: 593 - DNA, 21 bp, synthetic construct
  source 1..21: mol_type = other DNA
  modified_base 1: mod_base = OTHER; note = guanosine-3'-phosphate
  modified_base 2: mod_base = OTHER; note = guanosine-3'-phosphate
  modified_base 3: mod_base = OTHER; note = 2'-O-methylcytidine-3'-phosphate
  modified_base 4: mod_base = OTHER; note = 2'-O-methyluridine-3'-phosphate
  modified_base 5: mod_base = OTHER; note = guanosine-3'-phosphate
  modified_base 6: mod_base = OTHER; note = 2'-O-methylcytidine-3'-phosphate
  modified_base 7: mod_base = OTHER; note = adenosine-3'-phosphate
  modified_base 8: mod_base = OTHER; note = 2'-O-methylcytidine-3'-phosphate
  modified_base 9: mod_base = OTHER; note = 2'-O-methyluridine-3'-phosphate
  modified_base 10: mod_base = OTHER; note = adenosine-3'-phosphate
  modified_base 11: mod_base = OTHER; note = adenosine-3'-phosphate
  modified_base 12: mod_base = OTHER; note = 2'-O-methyluridine-3'-phosphate
  modified_base 13: mod_base = OTHER; note = 2'-O-methyluridine-3'-phosphate
  modified_base 14: mod_base = OTHER; note = guanosine-3'-phosphate
  modified_base 15: mod_base = OTHER; note = 2'-O-methyluridine-3'-phosphate
  modified_base 16: mod_base = OTHER; note = 2'-O-methylcytidine-3'-phosphate
  modified_base 17: mod_base = OTHER; note = 2'-O-methyluridine-3'-phosphate
  modified_base 18: mod_base = OTHER; note = adenosine-3'-phosphate
  modified_base 19: mod_base = OTHER; note = 2'-O-methyluridine-3'-phosphate
  modified_base 20: mod_base = OTHER; note = 2'-deoxythymidine-3'-phosphorothioate
  misc_feature 1..19: note = RNA
  misc_feature 20..21: note = DNA
ggctgcactaattgtctattt

SEQ ID NO: 594 - DNA, 21 bp, synthetic construct
  source 1..21: mol_type = other DNA
  modified_base 1: mod_base = OTHER; note = adenosine-3'-phosphate
  modified_base 2: mod_base = OTHER; note = 2'-O-methyluridine-3'-phosphate
  modified_base 3: mod_base = OTHER; note = adenosine-3'-phosphate
  modified_base 4: mod_base = OTHER; note = guanosine-3'-phosphate
  modified_base 5: mod_base = OTHER; note = adenosine-3'-phosphate
  modified_base 6: mod_base = OTHER; note = 2'-O-methylcytidine-3'-phosphate
  modified_base 7: mod_base = OTHER; note = adenosine-3'-phosphate
  modified_base 8: mod_base = OTHER; note = adenosine-3'-phosphate
  modified_base 9: mod_base = OTHER; note = uridine-3'-phosphate
  modified_base 10: mod_base = OTHER; note = 2'-O-methyluridine-3'-phosphate
  modified_base 11: mod_base = OTHER; note = adenosine-3'-phosphate
  modified_base 12: mod_base = OTHER; note = guanosine-3'-phosphate
  modified_base 13: mod_base = OTHER; note = uridine-3'-phosphate
  modified_base 14: mod_base = OTHER; note = guanosine-3'-phosphate
  modified_base 15: mod_base = OTHER; note = 2'-O-methylcytidine-3'-phosphate
  modified_base 16: mod_base = OTHER; note = adenosine-3'-phosphate
  modified_base 17: mod_base = OTHER; note = guanosine-3'-phosphate
  modified_base 18: mod_base = OTHER; note = cytidine-3'-phosphate
  modified_base 19: mod_base = OTHER; note = cytidine-3'-phosphate
  modified_base 20: mod_base = OTHER; note = 2'-deoxythymidine-3'-phosphorothioate
  misc_feature 1..19: note = RNA
  misc_feature 20..21: note = DNA
atagacaattagtgcagcctt

SEQ ID NO: 595 - DNA, 21 bp, synthetic construct
  source 1..21: mol_type = other DNA
  modified_base 1: mod_base = OTHER; note = 2'-O-methyluridine-3'-phosphate
  modified_base 2: mod_base = OTHER; note = guanosine-3'-phosphate
  modified_base 3: mod_base = OTHER; note = 2'-O-methylcytidine-3'-phosphate
  modified_base 4: mod_base = OTHER; note = adenosine-3'-phosphate
  modified_base 5: mod_base = OTHER; note = 2'-O-methylcytidine-3'-phosphate
  modified_base 6: mod_base = OTHER; note = 2'-O-methyluridine-3'-phosphate
  modified_base 7: mod_base = OTHER; note = adenosine-3'-phosphate
  modified_base 8: mod_base = OTHER; note = adenosine-3'-phosphate
  modified_base 9: mod_base = OTHER; note = 2'-O-methyluridine-3'-phosphate
  modified_base 10: mod_base = OTHER; note = 2'-O-methyluridine-3'-phosphate
  modified_base 11: mod_base = OTHER; note = guanosine-3'-phosphate
  modified_base 12: mod_base = OTHER; note = 2'-O-methyluridine-3'-phosphate
  modified_base 13: mod_base = OTHER; note = 2'-O-methylcytidine-3'-phosphate
  modified_base 14: mod_base = OTHER; note = 2'-O-methyluridine-3'-phosphate
  modified_base 15: mod_base = OTHER; note = adenosine-3'-phosphate
  modified_base 16: mod_base = OTHER; note = 2'-O-methyluridine-3'-phosphate
  modified_base 17: mod_base = OTHER; note = 2'-O-methyluridine-3'-phosphate
  modified_base 18: mod_base = OTHER; note = guanosine-3'-phosphate
  modified_base 19: mod_base = OTHER; note = guanosine-3'-phosphate
  modified_base 20: mod_base = OTHER; note = 2'-deoxythymidine-3'-phosphorothioate
  misc_feature 1..19: note = RNA
  misc_feature 20..21: note = DNA
tgcactaattgtctattggtt

SEQ ID NO: 596 - DNA, 21 bp, synthetic construct
  source 1..21: mol_type = other DNA
  modified_base 1: mod_base = OTHER; note = cytidine-3'-phosphate
  modified_base 2: mod_base = OTHER; note = 2'-O-methylcytidine-3'-phosphate
  modified_base 3: mod_base = OTHER; note = adenosine-3'-phosphate
  modified_base 4: mod_base = OTHER; note = adenosine-3'-phosphate
  modified_base 5: mod_base = OTHER; note = 2'-O-methyluridine-3'-phosphate
  modified_base 6: mod_base = OTHER; note = adenosine-3'-phosphate
  modified_base 7: mod_base = OTHER; note = guanosine-3'-phosphate
  modified_base 8: mod_base = OTHER; note = adenosine-3'-phosphate
  modified_base 9: mod_base = OTHER; note = 2'-O-methylcytidine-3'-phosphate
  modified_base 10: mod_base = OTHER; note = adenosine-3'-phosphate
  modified_base 11: mod_base = OTHER; note = adenosine-3'-phosphate
  modified_base 12: mod_base = OTHER; note = uridine-3'-phosphate
  modified_base 13: mod_base = OTHER; note = 2'-O-methyluridine-3'-phosphate
  modified_base 14: mod_base = OTHER; note = adenosine-3'-phosphate
  modified_base 15: mod_base = OTHER; note = guanosine-3'-phosphate
  modified_base 16: mod_base = OTHER; note = uridine-3'-phosphate
  modified_base 17: mod_base = OTHER; note = guanosine-3'-phosphate
  modified_base 18: mod_base = OTHER; note = 2'-O-methylcytidine-3'-phosphate
  modified_base 19: mod_base = OTHER; note = adenosine-3'-phosphate
  modified_base 20: mod_base = OTHER; note = 2'-deoxythymidine-3'-phosphorothioate
  misc_feature 1..19: note = RNA
  misc_feature 20..21: note = DNA
ccaatagacaattagtgcatt

SEQ ID NO: 597 - DNA, 21 bp, synthetic construct
  source 1..21: mol_type = other DNA
  modified_base 1: mod_base = OTHER; note = 2'-O-methyluridine-3'-phosphate
  modified_base 2: mod_base = OTHER; note = adenosine-3'-phosphate
  modified_base 3: mod_base = OTHER; note = 2'-O-methyluridine-3'-phosphate
  modified_base 4: mod_base = OTHER; note = 2'-O-methyluridine-3'-phosphate
  modified_base 5: mod_base = OTHER; note = guanosine-3'-phosphate
  modified_base 6: mod_base = OTHER; note = guanosine-3'-phosphate
  modified_base 7: mod_base = OTHER; note = guanosine-3'-phosphate
  modified_base 8: mod_base = OTHER; note = adenosine-3'-phosphate
  modified_base 9: mod_base = OTHER; note = adenosine-3'-phosphate
  modified_base 10: mod_base = OTHER; note = adenosine-3'-phosphate
  modified_base 11: mod_base = OTHER; note = 2'-O-methyluridine-3'-phosphate
  modified_base 12: mod_base = OTHER; note = guanosine-3'-phosphate
  modified_base 13: mod_base = OTHER; note = guanosine-3'-phosphate
  modified_base 14: mod_base = OTHER; note = adenosine-3'-phosphate
  modified_base 15: mod_base = OTHER; note = guanosine-3'-phosphate
  modified_base 16: mod_base = OTHER; note = guanosine-3'-phosphate
  modified_base 17: mod_base = OTHER; note = adenosine-3'-phosphate
  modified_base 18: mod_base = OTHER; note = 2'-O-methyluridine-3'-phosphate
  modified_base 19: mod_base = OTHER; note = adenosine-3'-phosphate
  modified_base 20: mod_base = OTHER; note = 2'-deoxythymidine-3'-phosphorothioate
  misc_feature 1..19: note = RNA
  misc_feature 20..21: note = DNA
tattgggaaatggaggatatt

SEQ ID NO: 598 - DNA, 21 bp, synthetic construct
  source 1..21: mol_type = other DNA
  modified_base 1: mod_base = OTHER; note = 2'-O-methyluridine-3'-phosphate
  modified_base 2: mod_base = OTHER; note = adenosine-3'-phosphate
  modified_base 3: mod_base = OTHER; note = uridine-3'-phosphate
  modified_base 4: mod_base = OTHER; note = cytidine-3'-phosphate
  modified_base 5: mod_base = OTHER; note = cytidine-3'-phosphate
  modified_base 6: mod_base = OTHER; note = uridine-3'-phosphate
  modified_base 7: mod_base = OTHER; note = cytidine-3'-phosphate
  modified_base 8: mod_base = OTHER; note = 2'-O-methylcytidine-3'-phosphate
  modified_base 9: mod_base = OTHER; note = adenosine-3'-phosphate
  modified_base 10: mod_base = OTHER; note = uridine-3'-phosphate
  modified_base 11: mod_base = OTHER; note = uridine-3'-phosphate
  modified_base 12: mod_base = OTHER; note = uridine-3'-phosphate
  modified_base 13: mod_base = OTHER; note = cytidine-3'-phosphate
  modified_base 14: mod_base = OTHER; note = cytidine-3'-phosphate
  modified_base 15: mod_base = OTHER; note = 2'-O-methylcytidine-3'-phosphate
  modified_base 16: mod_base = OTHER; note = adenosine-3'-phosphate
  modified_base 17: mod_base = OTHER; note = adenosine-3'-phosphate
  modified_base 18: mod_base = OTHER; note = 2'-O-methyluridine-3'-phosphate
  modified_base 19: mod_base = OTHER; note = adenosine-3'-phosphate
  modified_base 20: mod_base = OTHER; note = 2'-deoxythymidine-3'-phosphorothioate
  misc_feature 1..19: note = RNA
  misc_feature 20..21: note = DNA
tatcctccatttcccaatatt

SEQ ID NO: 599 - DNA, 21 bp, synthetic construct
  source 1..21: mol_type = other DNA
  modified_base 1: mod_base = OTHER; note = 2'-O-methylcytidine-3'-phosphate
  modified_base 2: mod_base = OTHER; note = adenosine-3'-phosphate
  modified_base 3: mod_base = OTHER; note = adenosine-3'-phosphate
  modified_base 4: mod_base = OTHER; note = 2'-O-methyluridine-3'-phosphate
  modified_base 5: mod_base = OTHER; note = 2'-O-methyluridine-3'-phosphate
  modified_base 6: mod_base = OTHER; note = 2'-O-methyluridine-3'-phosphate
  modified_base 7: mod_base = OTHER; note = guanosine-3'-phosphate
  modified_base 8: mod_base = OTHER; note = 2'-O-methyluridine-3'-phosphate
  modified_base 9: mod_base = OTHER; note = guanosine-3'-phosphate
  modified_base 10: mod_base = OTHER; note = 2'-O-methylcytidine-3'-phosphate
  modified_base 11: mod_base = OTHER; note = adenosine-3'-phosphate
  modified_base 12: mod_base = OTHER; note = 2'-O-methyluridine-3'-phosphate
  modified_base 13: mod_base = OTHER; note = guanosine-3'-phosphate
  modified_base 14: mod_base = OTHER; note = guanosine-3'-phosphate
  modified_base 15: mod_base = OTHER; note = adenosine-3'-phosphate
  modified_base 16: mod_base = OTHER; note = guanosine-3'-phosphate
  modified_base 17: mod_base = OTHER; note = adenosine-3'-phosphate
  modified_base 18: mod_base = OTHER; note = guanosine-3'-phosphate
  modified_base 19: mod_base = OTHER; note = guanosine-3'-phosphate
  modified_base 20: mod_base = OTHER; note = 2'-deoxythymidine-3'-phosphorothioate
  misc_feature 1..19: note = RNA
  misc_feature 20..21: note = DNA
caatttgtgcatggagaggtt

SEQ ID NO: 600 - DNA, 21 bp, synthetic construct
  source 1..21: mol_type = other DNA
  modified_base 1: mod_base = OTHER; note = cytidine-3'-phosphate
  modified_base 2: mod_base = OTHER; note = cytidine-3'-phosphate
  modified_base 3: mod_base = OTHER; note = uridine-3'-phosphate
  modified_base 4: mod_base = OTHER; note = cytidine-3'-phosphate
  modified_base 5: mod_base = OTHER; note = uridine-3'-phosphate
  modified_base 6: mod_base = OTHER; note = cytidine-3'-phosphate
  modified_base 7: mod_base = OTHER; note = 2'-O-methylcytidine-3'-phosphate
  modified_base 8: mod_base = OTHER; note = adenosine-3'-phosphate
  modified_base 9: mod_base = OTHER; note = uridine-3'-phosphate
  modified_base 10: mod_base = OTHER; note = guanosine-3'-phosphate
  modified_base 11: mod_base = OTHER; note = 2'-O-methylcytidine-3'-phosphate
  modified_base 12: mod_base = OTHER; note = adenosine-3'-phosphate
  modified_base 13: mod_base = OTHER; note = 2'-O-methylcytidine-3'-phosphate
  modified_base 14: mod_base = OTHER; note = adenosine-3'-phosphate
  modified_base 15: mod_base = OTHER; note = adenosine-3'-phosphate
  modified_base 16: mod_base = OTHER; note = adenosine-3'-phosphate
  modified_base 17: mod_base = OTHER; note = uridine-3'-phosphate
  modified_base 18: mod_base = OTHER; note = uridine-3'-phosphate
  modified_base 19: mod_base = OTHER; note = guanosine-3'-phosphate
  modified_base 20: mod_base = OTHER; note = 2'-deoxythymidine-3'-phosphorothioate
  misc_feature 1..19: note = RNA
  misc_feature 20..21: note = DNA
cctctccatgcacaaattgtt

SEQ ID NO: 601 - DNA, 21 bp, synthetic construct
  source 1..21: mol_type = other DNA
  modified_base 1: mod_base = OTHER; note = 2'-O-methylcytidine-3'-phosphate
  modified_base 2: mod_base = OTHER; note = 2'-O-methylcytidine-3'-phosphate
  modified_base 3: mod_base = OTHER; note = 2'-O-methyluridine-3'-phosphate
  modified_base 4: mod_base = OTHER; note = guanosine-3'-phosphate
  modified_base 5: mod_base = OTHER; note = adenosine-3'-phosphate
  modified_base 6: mod_base = OTHER; note = adenosine-3'-phosphate
  modified_base 7: mod_base = OTHER; note = guanosine-3'-phosphate
  modified_base 8: mod_base = OTHER; note = guanosine-3'-phosphate
  modified_base 9: mod_base = OTHER; note = 2'-O-methyluridine-3'-phosphate
  modified_base 10: mod_base = OTHER; note = 2'-O-methyluridine-3'-phosphate
  modified_base 11: mod_base = OTHER; note = 2'-O-methylcytidine-3'-phosphate
  modified_base 12: mod_base = OTHER; note = adenosine-3'-phosphate
  modified_base 13: mod_base = OTHER; note = guanosine-3'-phosphate
  modified_base 14: mod_base = OTHER; note = 2'-O-methylcytidine-3'-phosphate
  modified_base 15: mod_base = OTHER; note = adenosine-3'-phosphate
  modified_base 16: mod_base = OTHER; note = 2'-O-methyluridine-3'-phosphate
  modified_base 17: mod_base = OTHER; note = adenosine-3'-phosphate
  modified_base 18: mod_base = OTHER; note = guanosine-3'-phosphate
  modified_base 19: mod_base = OTHER; note = 2'-O-methyluridine-3'-phosphate
  modified_base 20: mod_base = OTHER; note = 2'-deoxythymidine-3'-phosphorothioate
  misc_feature 1..19: note = RNA
  misc_feature 20..21: note = DNA
cctgaaggttcagcatagttt

SEQ ID NO: 602 - DNA, 21 bp, synthetic construct
  source 1..21: mol_type = other DNA
  modified_base 1: mod_base = OTHER; note = adenosine-3'-phosphate
  modified_base 2: mod_base = OTHER; note = cytidine-3'-phosphate
  modified_base 3: mod_base = OTHER; note = 2'-O-methyluridine-3'-phosphate
  modified_base 4: mod_base = OTHER; note = adenosine-3'-phosphate
  modified_base 5: mod_base = OTHER; note = uridine-3'-phosphate
  modified_base 6: mod_base = OTHER; note = guanosine-3'-phosphate
  modified_base 7: mod_base = OTHER; note = cytidine-3'-phosphate
  modified_base 8: mod_base = OTHER; note = uridine-3'-phosphate
  modified_base 9: mod_base = OTHER; note = guanosine-3'-phosphate
  modified_base 10: mod_base = OTHER; note = adenosine-3'-phosphate
  modified_base 11: mod_base = OTHER; note = adenosine-3'-phosphate
  modified_base 12: mod_base = OTHER; note = cytidine-3'-phosphate
  modified_base 13: mod_base = OTHER; note = cytidine-3'-phosphate
  modified_base 14: mod_base = OTHER; note = uridine-3'-phosphate
  modified_base 15: mod_base = OTHER; note = uridine-3'-phosphate
  modified_base 16: mod_base = OTHER; note = 2'-O-methylcytidine-3'-phosphate
  modified_base 17: mod_base = OTHER; note = adenosine-3'-phosphate
  modified_base 18: mod_base = OTHER; note = guanosine-3'-phosphate
  modified_base 19: mod_base = OTHER; note = guanosine-3'-phosphate
  modified_base 20: mod_base = OTHER; note = 2'-deoxythymidine-3'-phosphorothioate
  misc_feature 1..19: note = RNA
  misc_feature 20..21: note = DNA
actatgctgaaccttcaggtt

SEQ ID NO: 603 - DNA, 21 bp, synthetic construct
  source 1..21: mol_type = other DNA
  modified_base 1: mod_base = OTHER; note = 2'-O-methyluridine-3'-phosphate
  modified_base 2: mod_base = OTHER; note = guanosine-3'-phosphate
  modified_base 3: mod_base = OTHER; note = adenosine-3'-phosphate
  modified_base 4: mod_base = OTHER; note = adenosine-3'-phosphate
  modified_base 5: mod_base = OTHER; note = guanosine-3'-phosphate
  modified_base 6: mod_base = OTHER; note = guanosine-3'-phosphate
  modified_base 7: mod_base = OTHER; note = 2'-O-methyluridine-3'-phosphate
  modified_base 8: mod_base = OTHER; note = 2'-O-methyluridine-3'-phosphate
  modified_base 9: mod_base = OTHER; note = 2'-O-methylcytidine-3'-phosphate
  modified_base 10: mod_base = OTHER; note = adenosine-3'-phosphate
  modified_base 11: mod_base = OTHER; note = guanosine-3'-phosphate
  modified_base 12: mod_base = OTHER; note = 2'-O-methylcytidine-3'-phosphate
  modified_base 13: mod_base = OTHER; note = adenosine-3'-phosphate
  modified_base 14: mod_base = OTHER; note = 2'-O-methyluridine-3'-phosphate
  modified_base 15: mod_base = OTHER; note = adenosine-3'-phosphate
  modified_base 16: mod_base = OTHER; note = guanosine-3'-phosphate
  modified_base 17: mod_base = OTHER; note = 2'-O-methyluridine-3'-phosphate
  modified_base 18: mod_base = OTHER; note = adenosine-3'-phosphate
  modified_base 19: mod_base = OTHER; note = guanosine-3'-phosphate
  modified_base 20: mod_base = OTHER; note = 2'-deoxythymidine-3'-phosphorothioate
  misc_feature 1..19: note = RNA
  misc_feature 20..21: note = DNA
tgaaggttcagcatagtagtt

SEQ ID NO: 604 - DNA, 21 bp, synthetic construct
  source 1..21: mol_type = other DNA
  modified_base 1: mod_base = OTHER; note = cytidine-3'-phosphate
  modified_base 2: mod_base = OTHER; note = 2'-O-methyluridine-3'-phosphate
  modified_base 3: mod_base = OTHER; note = adenosine-3'-phosphate
  modified_base 4: mod_base = OTHER; note = cytidine-3'-phosphate
  modified_base 5: mod_base = OTHER; note = 2'-O-methyluridine-3'-phosphate
  modified_base 6: mod_base = OTHER; note = adenosine-3'-phosphate
  modified_base 7: mod_base = OTHER; note = uridine-3'-phosphate
  modified_base 8: mod_base = OTHER; note = guanosine-3'-phosphate
  modified_base 9: mod_base = OTHER; note = cytidine-3'-phosphate
  modified_base 10: mod_base = OTHER; note = uridine-3'-phosphate
  modified_base 11: mod_base = OTHER; note = guanosine-3'-phosphate
  modified_base 12: mod_base = OTHER; note = adenosine-3'-phosphate
  modified_base 13: mod_base = OTHER; note = adenosine-3'-phosphate
  modified_base 14: mod_base = OTHER; note = cytidine-3'-phosphate
  modified_base 15: mod_base = OTHER; note = cytidine-3'-phosphate
  modified_base 16: mod_base = OTHER; note = uridine-3'-phosphate
  modified_base 17: mod_base = OTHER; note = uridine-3'-phosphate
  modified_base 18: mod_base = OTHER; note = 2'-O-methylcytidine-3'-phosphate
  modified_base 19: mod_base = OTHER; note = adenosine-3'-phosphate
  modified_base 20: mod_base = OTHER; note = 2'-deoxythymidine-3'-phosphorothioate
  misc_feature 1..19: note = RNA
  misc_feature 20..21: note = DNA
ctactatgctgaaccttcatt

SEQ ID NO: 605 - DNA, 21 bp, synthetic construct
  source 1..21: mol_type = other DNA
  modified_base 1: mod_base = OTHER; note = guanosine-3'-phosphate
  modified_base 2: mod_base = OTHER; note = guanosine-3'-phosphate
  modified_base 3: mod_base = OTHER; note = 2'-O-methyluridine-3'-phosphate
  modified_base 4: mod_base = OTHER; note = 2'-O-methyluridine-3'-phosphate
  modified_base 5: mod_base = OTHER; note = 2'-O-methylcytidine-3'-phosphate
  modified_base 6: mod_base = OTHER; note = adenosine-3'-phosphate
  modified_base 7: mod_base = OTHER; note = guanosine-3'-phosphate
  modified_base 8: mod_base = OTHER; note = 2'-O-methylcytidine-3'-phosphate
  modified_base 9: mod_base = OTHER; note = adenosine-3'-phosphate
  modified_base 10: mod_base = OTHER; note = 2'-O-methyluridine-3'-phosphate
  modified_base 11: mod_base = OTHER; note = adenosine-3'-phosphate
  modified_base 12: mod_base = OTHER; note = guanosine-3'-phosphate
  modified_base 13: mod_base = OTHER; note = 2'-O-methyluridine-3'-phosphate
  modified_base 14: mod_base = OTHER; note = adenosine-3'-phosphate
  modified_base 15: mod_base = OTHER; note = guanosine-3'-phosphate
  modified_base 16: mod_base = OTHER; note = 2'-O-methylcytidine-3'-phosphate
  modified_base 17: mod_base = OTHER; note = 2'-O-methyluridine-3'-phosphate
  modified_base 18: mod_base = OTHER; note = adenosine-3'-phosphate
  modified_base 19: mod_base = OTHER; note = 2'-O-methylcytidine-3'-phosphate
  modified_base 20: mod_base = OTHER; note = 2'-deoxythymidine-3'-phosphorothioate
  misc_feature 1..19: note = RNA
  misc_feature 20..21: note = DNA
ggttcagcatagtagctactt

SEQ ID NO: 606 - DNA, 21 bp, synthetic construct
  source 1..21: mol_type = other DNA
  modified_base 1: mod_base = OTHER; note = guanosine-3'-phosphate
  modified_base 2: mod_base = OTHER; note = 2'-O-methyluridine-3'-phosphate
  modified_base 3: mod_base = OTHER; note = adenosine-3'-phosphate
  modified_base 4: mod_base = OTHER; note = guanosine-3'-phosphate
  modified_base 5: mod_base = OTHER; note = cytidine-3'-phosphate
  modified_base 6: mod_base = OTHER; note = 2'-O-methyluridine-3'-phosphate
  modified_base 7: mod_base = OTHER; note = adenosine-3'-phosphate
  modified_base 8: mod_base = OTHER; note = cytidine-3'-phosphate
  modified_base 9: mod_base = OTHER; note = 2'-O-methyluridine-3'-phosphate
  modified_base 10: mod_base = OTHER; note = adenosine-3'-phosphate
  modified_base 11: mod_base = OTHER; note = uridine-3'-phosphate
  modified_base 12: mod_base = OTHER; note = guanosine-3'-phosphate
  modified_base 13: mod_base = OTHER; note = cytidine-3'-phosphate
  modified_base 14: mod_base = OTHER; note = uridine-3'-phosphate
  modified_base 15: mod_base = OTHER; note = guanosine-3'-phosphate
  modified_base 16: mod_base = OTHER; note = adenosine-3'-phosphate
  modified_base 17: mod_base = OTHER; note = adenosine-3'-phosphate
  modified_base 18: mod_base = OTHER; note = cytidine-3'-phosphate
  modified_base 19: mod_base = OTHER; note = cytidine-3'-phosphate
  modified_base 20: mod_base = OTHER; note = 2'-deoxythymidine-3'-phosphorothioate
  misc_feature 1..19: note = RNA
  misc_feature 20..21: note = DNA
gtagctactatgctgaacctt

SEQ ID NO: 607 - DNA, 21 bp, synthetic construct
  source 1..21: mol_type = other DNA
  modified_base 1: mod_base = OTHER; note = guanosine-3'-phosphate
  modified_base 2: mod_base = OTHER; note = 2'-O-methyluridine-3'-phosphate
  modified_base 3: mod_base = OTHER; note = 2'-O-methyluridine-3'-phosphate
  modified_base 4: mod_base = OTHER; note = 2'-O-methylcytidine-3'-phosphate
  modified_base 5: mod_base = OTHER; note = adenosine-3'-phosphate
  modified_base 6: mod_base = OTHER; note = guanosine-3'-phosphate
  modified_base 7: mod_base = OTHER; note = 2'-O-methylcytidine-3'-phosphate
  modified_base 8: mod_base = OTHER; note = adenosine-3'-phosphate
  modified_base 9: mod_base = OTHER; note = 2'-O-methyluridine-3'-phosphate
  modified_base 10: mod_base = OTHER; note = adenosine-3'-phosphate
  modified_base 11: mod_base = OTHER; note = guanosine-3'-phosphate
  modified_base 12: mod_base = OTHER; note = 2'-O-methyluridine-3'-phosphate
  modified_base 13: mod_base = OTHER; note = adenosine-3'-phosphate
  modified_base 14: mod_base = OTHER; note = guanosine-3'-phosphate
  modified_base 15: mod_base = OTHER; note = 2'-O-methylcytidine-3'-phosphate
  modified_base 16: mod_base = OTHER; note = 2'-O-methyluridine-3'-phosphate
  modified_base 17: mod_base = OTHER; note = adenosine-3'-phosphate
  modified_base 18: mod_base = OTHER; note = 2'-O-methylcytidine-3'-phosphate
  modified_base 19: mod_base = OTHER; note = adenosine-3'-phosphate
  modified_base 20: mod_base = OTHER; note = 2'-deoxythymidine-3'-phosphorothioate
  misc_feature 1..19: note = RNA
  misc_feature 20..21: note = DNA
gttcagcatagtagctacatt

SEQ ID NO: 608 - DNA, 21 bp, synthetic construct
  source 1..21: mol_type = other DNA
  modified_base 1: mod_base = OTHER; note = uridine-3'-phosphate
  modified_base 2: mod_base = OTHER; note = guanosine-3'-phosphate
  modified_base 3: mod_base = OTHER; note = 2'-O-methyluridine-3'-phosphate
  modified_base 4: mod_base = OTHER; note = adenosine-3'-phosphate
  modified_base 5: mod_base = OTHER; note = guanosine-3'-phosphate
  modified_base 6: mod_base = OTHER; note = cytidine-3'-phosphate
  modified_base 7: mod_base = OTHER; note = 2'-O-methyluridine-3'-phosphate
  modified_base 8: mod_base = OTHER; note = adenosine-3'-phosphate
  modified_base 9: mod_base = OTHER; note = cytidine-3'-phosphate
  modified_base 10: mod_base = OTHER; note = 2'-O-methyluridine-3'-phosphate
  modified_base 11: mod_base = OTHER; note = adenosine-3'-phosphate
  modified_base 12: mod_base = OTHER; note = uridine-3'-phosphate
  modified_base 13: mod_base = OTHER; note = guanosine-3'-phosphate
  modified_base 14: mod_base = OTHER; note = cytidine-3'-phosphate
  modified_base 15: mod_base = OTHER; note = uridine-3'-phosphate
  modified_base 16: mod_base = OTHER; note = guanosine-3'-phosphate
  modified_base 17: mod_base = OTHER; note = adenosine-3'-phosphate
  modified_base 18: mod_base = OTHER; note = adenosine-3'-phosphate
  modified_base 19: mod_base = OTHER; note = cytidine-3'-phosphate
  modified_base 20: mod_base = OTHER; note = 2'-deoxythymidine-3'-phosphorothioate
  misc_feature 1..19: note = RNA
  misc_feature 20..21: note = DNA
tgtagctactatgctgaactt

SEQ ID NO: 609 - DNA, 21 bp, synthetic construct
  source 1..21: mol_type = other DNA
  modified_base 1: mod_base = OTHER; note = 2'-O-methyluridine-3'-phosphate
  modified_base 2: mod_base = OTHER; note = 2'-O-methyluridine-3'-phosphate
  modified_base 3: mod_base = OTHER; note = 2'-O-methylcytidine-3'-phosphate
  modified_base 4: mod_base = OTHER; note = adenosine-3'-phosphate
  modified_base 5: mod_base = OTHER; note = guanosine-3'-phosphate
  modified_base 6: mod_base = OTHER; note = 2'-O-methylcytidine-3'-phosphate
  modified_base 7: mod_base = OTHER; note = adenosine-3'-phosphate
  modified_base 8: mod_base = OTHER; note = 2'-O-methyluridine-3'-phosphate
  modified_base 9: mod_base = OTHER; note = adenosine-3'-phosphate
  modified_base 10: mod_base = OTHER; note = guanosine-3'-phosphate
  modified_base 11: mod_base = OTHER; note = 2'-O-methyluridine-3'-phosphate
  modified_base 12: mod_base = OTHER; note = adenosine-3'-phosphate
  modified_base 13: mod_base = OTHER; note = guanosine-3'-phosphate
  modified_base 14: mod_base = OTHER; note = 2'-O-methylcytidine-3'-phosphate
  modified_base 15: mod_base = OTHER; note = 2'-O-methyluridine-3'-phosphate
  modified_base 16: mod_base = OTHER; note = adenosine-3'-phosphate
  modified_base 17: mod_base = OTHER; note = 2'-O-methylcytidine-3'-phosphate
  modified_base 18: mod_base = OTHER; note = adenosine-3'-phosphate
  modified_base 19: mod_base = OTHER; note = guanosine-3'-phosphate
  modified_base 20: mod_base = OTHER; note = 2'-deoxythymidine-3'-phosphorothioate
  misc_feature 1..19: note = RNA
  misc_feature 20..21: note = DNA
ttcagcatagtagctacagtt

SEQ ID NO: 610 - DNA, 21 bp, synthetic construct
  source 1..21: mol_type = other DNA
  modified_base 1: mod_base = OTHER; note = cytidine-3'-phosphate
  modified_base 2: mod_base = OTHER; note = uridine-3'-phosphate
  modified_base 3: mod_base = OTHER; note = guanosine-3'-phosphate
  modified_base 4: mod_base = OTHER; note = 2'-O-methyluridine-3'-phosphate
  modified_base 5: mod_base = OTHER; note = adenosine-3'-phosphate
  modified_base 6: mod_base = OTHER; note = guanosine-3'-phosphate
  modified_base 7: mod_base = OTHER; note = cytidine-3'-phosphate
  modified_base 8: mod_base = OTHER; note = 2'-O-methyluridine-3'-phosphate
  modified_base 9: mod_base = OTHER; note = adenosine-3'-phosphate
  modified_base 10: mod_base = OTHER; note = cytidine-3'-phosphate
  modified_base 11: mod_base = OTHER; note = 2'-O-methyluridine-3'-phosphate
  modified_base 12: mod_base = OTHER; note = adenosine-3'-phosphate
  modified_base 13: mod_base = OTHER; note = uridine-3'-phosphate
  modified_base 14: mod_base = OTHER; note = guanosine-3'-phosphate
  modified_base 15: mod_base = OTHER; note = cytidine-3'-phosphate
  modified_base 16: mod_base = OTHER; note = uridine-3'-phosphate
  modified_base 17: mod_base = OTHER; note = guanosine-3'-phosphate
  modified_base 18: mod_base = OTHER; note = adenosine-3'-phosphate
  modified_base 19: mod_base = OTHER; note = adenosine-3'-phosphate
  modified_base 20: mod_base = OTHER; note = 2'-deoxythymidine-3'-phosphorothioate
  misc_feature 1..19: note = RNA
  misc_feature 20..21: note = DNA
ctgtagctactatgctgaatt

SEQ ID NO: 611 - DNA, 21 bp, synthetic construct
  source 1..21: mol_type = other DNA
  modified_base 1: mod_base = OTHER; note = 2'-O-methylcytidine-3'-phosphate
  modified_base 2: mod_base = OTHER; note = adenosine-3'-phosphate
  modified_base 3: mod_base = OTHER; note = 2'-O-methyluridine-3'-phosphate
  modified_base 4: mod_base = OTHER; note = adenosine-3'-phosphate
  modified_base 5: mod_base = OTHER; note = guanosine-3'-phosphate
  modified_base 6: mod_base = OTHER; note = 2'-O-methyluridine-3'-phosphate
  modified_base 7: mod_base = OTHER; note = adenosine-3'-phosphate
  modified_base 8: mod_base = OTHER; note = guanosine-3'-phosphate
  modified_base 9: mod_base = OTHER; note = 2'-O-methylcytidine-3'-phosphate
  modified_base 10: mod_base = OTHER; note = 2'-O-methyluridine-3'-phosphate
  modified_base 11: mod_base = OTHER; note = adenosine-3'-phosphate
  modified_base 12: mod_base = OTHER; note = 2'-O-methylcytidine-3'-phosphate
  modified_base 13: mod_base = OTHER; note = adenosine-3'-phosphate
  modified_base 14: mod_base = OTHER; note = guanosine-3'-phosphate
  modified_base 15: mod_base = OTHER; note = adenosine-3'-phosphate
  modified_base 16: mod_base = OTHER; note = 2'-O-methylcytidine-3'-phosphate
  modified_base 17: mod_base = OTHER; note = adenosine-3'-phosphate
  modified_base 18: mod_base = OTHER; note = guanosine-3'-phosphate
  modified_base 19: mod_base = OTHER; note = adenosine-3'-phosphate
  modified_base 20: mod_base = OTHER; note = 2'-deoxythymidine-3'-phosphorothioate
  misc_feature 1..19: note = RNA
  misc_feature 20..21: note = DNA
catagtagctacagacagatt

SEQ ID NO: 612 - DNA, 21 bp, synthetic construct
  source 1..21: mol_type = other DNA
  modified_base 1: mod_base = OTHER; note = uridine-3'-phosphate
  modified_base 2: mod_base = OTHER; note = cytidine-3'-phosphate
  modified_base 3: mod_base = OTHER; note = uridine-3'-phosphate
  modified_base 4: mod_base = OTHER; note = guanosine-3'-phosphate
  modified_base 5: mod_base = OTHER; note = uridine-3'-phosphate
  modified_base 6: mod_base = OTHER; note = cytidine-3'-phosphate
  modified_base 7: mod_base = OTHER; note = uridine-3'-phosphate
  modified_base 8: mod_base = OTHER; note = guanosine-3'-phosphate
  modified_base 9: mod_base = OTHER; note = 2'-O-methyluridine-3'-phosphate
  modified_base 10: mod_base = OTHER; note = adenosine-3'-phosphate
  modified_base 11: mod_base = OTHER; note = guanosine-3'-phosphate
  modified_base 12: mod_base = OTHER; note = cytidine-3'-phosphate
  modified_base 13: mod_base = OTHER; note = 2'-O-methyluridine-3'-phosphate
  modified_base 14: mod_base = OTHER; note = adenosine-3'-phosphate
  modified_base 15: mod_base = OTHER; note = cytidine-3'-phosphate
  modified_base 16: mod_base = OTHER; note = 2'-O-methyluridine-3'-phosphate
  modified_base 17: mod_base = OTHER; note = adenosine-3'-phosphate
  modified_base 18: mod_base = OTHER; note = uridine-3'-phosphate
  modified_base 19: mod_base = OTHER; note = guanosine-3'-phosphate
  modified_base 20: mod_base = OTHER; note = 2'-deoxythymidine-3'-phosphorothioate
  misc_feature 1..19: note = RNA
  misc_feature 20..21: note = DNA
tctgtctgtagctactatgtt

SEQ ID NO: 613 - DNA, 21 bp, synthetic construct
  source 1..21: mol_type = other DNA
  modified_base 1: mod_base = OTHER; note = adenosine-3'-phosphate
  modified_base 2: mod_base = OTHER; note = 2'-O-methyluridine-3'-phosphate
  modified_base 3: mod_base = OTHER; note = adenosine-3'-phosphate
  modified_base 4: mod_base = OTHER; note = guanosine-3'-phosphate
  modified_base 5: mod_base = OTHER; note = 2'-O-methyluridine-3'-phosphate
  modified_base 6: mod_base = OTHER; note = adenosine-3'-phosphate
  modified_base 7: mod_base = OTHER; note = guanosine-3'-phosphate
  modified_base 8: mod_base = OTHER; note = 2'-O-methylcytidine-3'-phosphate
  modified_base 9: mod_base = OTHER; note = 2'-O-methyluridine-3'-phosphate
  modified_base 10: mod_base = OTHER; note = adenosine-3'-phosphate
  modified_base 11: mod_base = OTHER; note = 2'-O-methylcytidine-3'-phosphate
  modified_base 12: mod_base = OTHER; note = adenosine-3'-phosphate
  modified_base 13: mod_base = OTHER; note = guanosine-3'-phosphate
  modified_base 14: mod_base = OTHER; note = adenosine-3'-phosphate
  modified_base 15: mod_base = OTHER; note = 2'-O-methylcytidine-3'-phosphate
  modified_base 16: mod_base = OTHER; note = adenosine-3'-phosphate
  modified_base 17: mod_base = OTHER; note = guanosine-3'-phosphate
  modified_base 18: mod_base = OTHER; note = adenosine-3'-phosphate
  modified_base 19: mod_base = OTHER; note = guanosine-3'-phosphate
  modified_base 20: mod_base = OTHER; note = 2'-deoxythymidine-3'-phosphorothioate
  misc_feature 1..19: note = RNA
  misc_feature 20..21: note = DNA
atagtagctacagacagagtt

SEQ ID NO: 614 - DNA, 21 bp, synthetic construct
  source 1..21: mol_type = other DNA
  modified_base 1: mod_base = OTHER; note = cytidine-3'-phosphate
  modified_base 2: mod_base = OTHER; note = uridine-3'-phosphate
  modified_base 3: mod_base = OTHER; note = cytidine-3'-phosphate
  modified_base 4: mod_base = OTHER; note = uridine-3'-phosphate
  modified_base 5: mod_base = OTHER; note = guanosine-3'-phosphate
  modified_base 6: mod_base = OTHER; note = uridine-3'-phosphate
  modified_base 7: mod_base = OTHER; note = cytidine-3'-phosphate
  modified_base 8: mod_base = OTHER; note = uridine-3'-phosphate
  modified_base 9: mod_base = OTHER; note = guanosine-3'-phosphate
  modified_base 10: mod_base = OTHER; note = 2'-O-methyluridine-3'-phosphate
  modified_base 11: mod_base = OTHER; note = adenosine-3'-phosphate
  modified_base 12: mod_base = OTHER; note = guanosine-3'-phosphate
  modified_base 13: mod_base = OTHER; note = cytidine-3'-phosphate
  modified_base 14: mod_base = OTHER; note = 2'-O-methyluridine-3'-phosphate
  modified_base 15: mod_base = OTHER; note = adenosine-3'-phosphate
  modified_base 16: mod_base = OTHER; note = cytidine-3'-phosphate
  modified_base 17: mod_base = OTHER; note = 2'-O-methyluridine-3'-phosphate
  modified_base 18: mod_base = OTHER; note = adenosine-3'-phosphate
  modified_base 19: mod_base = OTHER; note = uridine-3'-phosphate
  modified_base 20: mod_base = OTHER; note = 2'-deoxythymidine-3'-phosphorothioate
  misc_feature 1..19: note = RNA
  misc_feature 20..21: note = DNA
ctctgtctgtagctactattt

SEQ ID NO: 615 - DNA, 21 bp, synthetic construct
  source 1..21: mol_type = other DNA
  modified_base 1: mod_base = OTHER; note = 2'-O-methylcytidine-3'-phosphate
  modified_base 2: mod_base = OTHER; note = 2'-O-methyluridine-3'-phosphate
  modified_base 3: mod_base = OTHER; note = adenosine-3'-phosphate
  modified_base 4: mod_base = OTHER; note = 2'-O-methylcytidine-3'-phosphate
  modified_base 5: mod_base = OTHER; note = adenosine-3'-phosphate
  modified_base 6: mod_base = OTHER; note = guanosine-3'-phosphate
  modified_base 7: mod_base = OTHER; note = adenosine-3'-phosphate
  modified_base 8: mod_base = OTHER; note = 2'-O-methylcytidine-3'-phosphate
  modified_base 9: mod_base = OTHER; note = adenosine-3'-phosphate
  modified_base 10: mod_base = OTHER; note = guanosine-3'-phosphate
  modified_base 11: mod_base = OTHER; note = adenosine-3'-phosphate
  modified_base 12: mod_base = OTHER; note = guanosine-3'-phosphate
  modified_base 13: mod_base = OTHER; note = guanosine-3'-phosphate
  modified_base 14: mod_base = OTHER; note = guanosine-3'-phosphate
  modified_base 15: mod_base = OTHER; note = 2'-O-methylcytidine-3'-phosphate
  modified_base 16: mod_base = OTHER; note = 2'-O-methylcytidine-3'-phosphate
  modified_base 17: mod_base = OTHER; note = 2'-O-methylcytidine-3'-phosphate
  modified_base 18: mod_base = OTHER; note = guanosine-3'-phosphate
  modified_base 19: mod_base = OTHER; note = guanosine-3'-phosphate
  modified_base 20: mod_base = OTHER; note = 2'-deoxythymidine-3'-phosphorothioate
  misc_feature 1..19: note = RNA
  misc_feature 20..21: note = DNA
ctacagacagagggcccggtt

SEQ ID NO: 616 - DNA, 21 bp, synthetic construct
  source 1..21: mol_type = other DNA
  modified_base 1: mod_base = OTHER; note = cytidine-3'-phosphate
  modified_base 2: mod_base = OTHER; note = cytidine-3'-phosphate
  modified_base 3: mod_base = OTHER; note = guanosine-3'-phosphate
  modified_base 4: mod_base = OTHER; note = guanosine-3'-phosphate
  modified_base 5: mod_base = OTHER; note = guanosine-3'-phosphate
  modified_base 6: mod_base = OTHER; note = cytidine-3'-phosphate
  modified_base 7: mod_base = OTHER; note = cytidine-3'-phosphate
  modified_base 8: mod_base = OTHER; note = cytidine-3'-phosphate
  modified_base 9: mod_base = OTHER; note = uridine-3'-phosphate
  modified_base 10: mod_base = OTHER; note = cytidine-3'-phosphate
  modified_base 11: mod_base = OTHER; note = uridine-3'-phosphate
  modified_base 12: mod_base = OTHER; note = guanosine-3'-phosphate
  modified_base 13: mod_base = OTHER; note = uridine-3'-phosphate
  modified_base 14: mod_base = OTHER; note = cytidine-3'-phosphate
  modified_base 15: mod_base = OTHER; note = uridine-3'-phosphate
  modified_base 16: mod_base = OTHER; note = guanosine-3'-phosphate
  modified_base 17: mod_base = OTHER; note = 2'-O-methyluridine-3'-phosphate
  modified_base 18: mod_base = OTHER; note = adenosine-3'-phosphate
  modified_base 19: mod_base = OTHER; note = guanosine-3'-phosphate
  modified_base 20: mod_base = OTHER; note = 2'-deoxythymidine-3'-phosphorothioate
  misc_feature 1..19: note = RNA
  misc_feature 20..21: note = DNA
ccgggccctctgtctgtagtt

SEQ ID NO: 617 - DNA, 21 bp, synthetic construct
  source 1..21: mol_type = other DNA
  modified_base 1: mod_base = OTHER; note = guanosine-3'-phosphate
  modified_base 2: mod_base = OTHER; note = 2'-O-methylcytidine-3'-phosphate
  modified_base 3: mod_base = OTHER; note = 2'-O-methyluridine-3'-phosphate
  modified_base 4: mod_base = OTHER; note = guanosine-3'-phosphate
  modified_base 5: mod_base = OTHER; note = 2'-O-methylcytidine-3'-phosphate
  modified_base 6: mod_base = OTHER; note = adenosine-3'-phosphate
  modified_base 7: mod_base = OTHER; note = 2'-O-methylcytidine-3'-phosphate
  modified_base 8: mod_base = OTHER; note = 2'-O-methyluridine-3'-phosphate
  modified_base 9: mod_base = OTHER; note = 2'-O-methyluridine-3'-phosphate
  modified_base 10: mod_base = OTHER; note = 2'-O-methylcytidine-3'-phosphate
  modified_base 11: mod_base = OTHER; note = adenosine-3'-phosphate
  modified_base 12: mod_base = OTHER; note = guanosine-3'-phosphate
  modified_base 13: mod_base = OTHER; note = adenosine-3'-phosphate
  modified_base 14: mod_base = OTHER; note = 2'-O-methyluridine-3'-phosphate
  modified_base 15: mod_base = OTHER; note = 2'-O-methylcytidine-3'-phosphate
  modified_base 16: mod_base = OTHER; note = adenosine-3'-phosphate
  modified_base 17: mod_base = OTHER; note = 2'-O-methylcytidine-3'-phosphate
  modified_base 18: mod_base = OTHER; note = adenosine-3'-phosphate
  modified_base 19: mod_base = OTHER; note = guanosine-3'-phosphate
  modified_base 20: mod_base = OTHER; note = 2'-deoxythymidine-3'-phosphorothioate
  misc_feature 1..19: note = RNA
  misc_feature 20..21: note = DNA
gctgcacttcagatcacagtt

SEQ ID NO: 618 - DNA, 21 bp, synthetic construct
  source 1..21: mol_type = other DNA
  modified_base 1: mod_base = OTHER; note = cytidine-3'-phosphate
  modified_base 2: mod_base = OTHER; note = uridine-3'-phosphate
  modified_base 3: mod_base = OTHER; note = guanosine-3'-phosphate
  modified_base 4: mod_base = OTHER; note = uridine-3'-phosphate
  modified_base 5: mod_base = OTHER; note = guanosine-3'-phosphate
  modified_base 6: mod_base = OTHER; note = adenosine-3'-phosphate
  modified_base 7: mod_base = OTHER; note = uridine-3'-phosphate
  modified_base 8: mod_base = OTHER; note = cytidine-3'-phosphate
  modified_base 9: mod_base = OTHER; note = uridine-3'-phosphate
  modified_base 10: mod_base = OTHER; note = guanosine-3'-phosphate
  modified_base 11: mod_base = OTHER; note = adenosine-3'-phosphate
  modified_base 12: mod_base = OTHER; note = adenosine-3'-phosphate
  modified_base 13: mod_base = OTHER; note = guanosine-3'-phosphate
  modified_base 14: mod_base = OTHER; note = uridine-3'-phosphate
  modified_base 15: mod_base = OTHER; note = guanosine-3'-phosphate
  modified_base 16: mod_base = OTHER; note = 2'-O-methylcytidine-3'-phosphate
  modified_base 17: mod_base = OTHER; note = adenosine-3'-phosphate
  modified_base 18: mod_base = OTHER; note = guanosine-3'-phosphate
  modified_base 19: mod_base = OTHER; note = cytidine-3'-phosphate
  modified_base 20: mod_base = OTHER; note = 2'-deoxythymidine-3'-phosphorothioate
  misc_feature 1..19: note = RNA
  misc_feature 20..21: note = DNA
ctgtgatctgaagtgcagctt

SEQ ID NO: 619 - DNA, 21 bp, synthetic construct
  source 1..21: mol_type = other DNA
  modified_base 1: mod_base = OTHER; note = 2'-O-methylcytidine-3'-phosphate
  modified_base 2: mod_base = OTHER; note = 2'-O-methyluridine-3'-phosphate
  modified_base 3: mod_base = OTHER; note = guanosine-3'-phosphate
  modified_base 4: mod_base = OTHER; note = 2'-O-methylcytidine-3'-phosphate
  modified_base 5: mod_base = OTHER; note = adenosine-3'-phosphate
  modified_base 6: mod_base = OTHER; note = 2'-O-methylcytidine-3'-phosphate
  modified_base 7: mod_base = OTHER; note = 2'-O-methyluridine-3'-phosphate
  modified_base 8: mod_base = OTHER; note = 2'-O-methyluridine-3'-phosphate
  modified_base 9: mod_base = OTHER; note = 2'-O-methylcytidine-3'-phosphate
  modified_base 10: mod_base = OTHER; note = adenosine-3'-phosphate
  modified_base 11: mod_base = OTHER; note = guanosine-3'-phosphate
  modified_base 12: mod_base = OTHER; note = adenosine-3'-phosphate
  modified_base 13: mod_base = OTHER; note = 2'-O-methyluridine-3'-phosphate
  modified_base 14: mod_base = OTHER; note = 2'-O-methylcytidine-3'-phosphate
  modified_base 15: mod_base = OTHER; note = adenosine-3'-phosphate
  modified_base 16: mod_base = OTHER; note = 2'-O-methylcytidine-3'-phosphate
  modified_base 17: mod_base = OTHER; note = adenosine-3'-phosphate
  modified_base 18: mod_base = OTHER; note = guanosine-3'-phosphate
  modified_base 19: mod_base = OTHER; note = adenosine-3'-phosphate
  modified_base 20: mod_base = OTHER; note = 2'-deoxythymidine-3'-phosphorothioate
  misc_feature 1..19: note = RNA
  misc_feature 20..21: note = DNA
ctgcacttcagatcacagatt

SEQ ID NO: 620 - DNA, 21 bp, synthetic construct
  source 1..21: mol_type = other DNA
  modified_base 1: mod_base = OTHER; note = uridine-3'-phosphate
  modified_base 2: mod_base = OTHER; note = cytidine-3'-phosphate
  modified_base 3: mod_base = OTHER; note = uridine-3'-phosphate
  modified_base 4: mod_base = OTHER; note = guanosine-3'-phosphate
  modified_base 5: mod_base = OTHER; note = uridine-3'-phosphate
  modified_base 6: mod_base = OTHER; note = guanosine-3'-phosphate
  modified_base 7: mod_base = OTHER; note = adenosine-3'-phosphate
  modified_base 8: mod_base = OTHER; note = uridine-3'-phosphate
  modified_base 9: mod_base = OTHER; note = cytidine-3'-phosphate
  modified_base 10: mod_base = OTHER; note = uridine-3'-phosphate
  modified_base 11: mod_base = OTHER; note = guanosine-3'-phosphate
  modified_base 12: mod_base = OTHER; note = adenosine-3'-phosphate
  modified_base 13: mod_base = OTHER; note = adenosine-3'-phosphate
  modified_base 14: mod_base = OTHER; note = guanosine-3'-phosphate
  modified_base 15: mod_base = OTHER; note = uridine-3'-phosphate
  modified_base 16: mod_base = OTHER; note = guanosine-3'-phosphate
  modified_base 17: mod_base = OTHER; note = 2'-O-methylcytidine-3'-phosphate
  modified_base 18: mod_base = OTHER; note = adenosine-3'-phosphate
  modified_base 19: mod_base = OTHER; note = guanosine-3'-phosphate
  modified_base 20: mod_base = OTHER; note = 2'-deoxythymidine-3'-phosphorothioate
  misc_feature 1..19: note = RNA
  misc_feature 20..21: note = DNA
tctgtgatctgaagtgcagtt

SEQ ID NO: 621 - DNA, 21 bp, synthetic construct
  source 1..21: mol_type = other DNA
  modified_base 1: mod_base = OTHER; note = 2'-O-methyluridine-3'-phosphate
  modified_base 2: mod_base = OTHER; note = guanosine-3'-phosphate
  modified_base 3: mod_base = OTHER; note = 2'-O-methylcytidine-3'-phosphate
  modified_base 4: mod_base = OTHER; note = adenosine-3'-phosphate
  modified_base 5: mod_base = OTHER; note = 2'-O-methylcytidine-3'-phosphate
  modified_base 6: mod_base = OTHER; note = 2'-O-methyluridine-3'-phosphate
  modified_base 7: mod_base = OTHER; note = 2'-O-methyluridine-3'-phosphate
  modified_base 8: mod_base = OTHER; note = 2'-O-methylcytidine-3'-phosphate
  modified_base 9: mod_base = OTHER; note = adenosine-3'-phosphate
  modified_base 10: mod_base = OTHER; note = guanosine-3'-phosphate
  modified_base 11: mod_base = OTHER; note = adenosine-3'-phosphate
  modified_base 12: mod_base = OTHER; note = 2'-O-methyluridine-3'-phosphate
  modified_base 13: mod_base = OTHER; note = 2'-O-methylcytidine-3'-phosphate
  modified_base 14: mod_base = OTHER; note = adenosine-3'-phosphate
  modified_base 15: mod_base = OTHER; note = 2'-O-methylcytidine-3'-phosphate
  modified_base 16: mod_base = OTHER; note = adenosine-3'-phosphate
  modified_base 17: mod_base = OTHER; note = guanosine-3'-phosphate
  modified_base 18: mod_base = OTHER; note = adenosine-3'-phosphate
  modified_base 19: mod_base = OTHER; note = 2'-O-methyluridine-3'-phosphate
  modified_base 20: mod_base = OTHER; note = 2'-deoxythymidine-3'-phosphorothioate
  misc_feature 1..19: note = RNA
  misc_feature 20..21: note = DNA
tgcacttcagatcacagattt

SEQ ID NO: 622 - DNA, 21 bp, synthetic construct
  source 1..21: mol_type = other DNA
  modified_base 1: mod_base = OTHER; note = adenosine-3'-phosphate
  modified_base 2: mod_base = OTHER; note = uridine-3'-phosphate
  modified_base 3: mod_base = OTHER; note = cytidine-3'-phosphate
  modified_base 4: mod_base = OTHER; note = uridine-3'-phosphate
  modified_base 5: mod_base = OTHER; note = guanosine-3'-phosphate
  modified_base 6: mod_base = OTHER; note = uridine-3'-phosphate
  modified_base 7: mod_base = OTHER; note = guanosine-3'-phosphate
  modified_base 8: mod_base = OTHER; note = adenosine-3'-phosphate
  modified_base 9: mod_base = OTHER; note = uridine-3'-phosphate
  modified_base 10: mod_base = OTHER; note = cytidine-3'-phosphate
  modified_base 11: mod_base = OTHER; note = uridine-3'-phosphate
  modified_base 12: mod_base = OTHER; note = guanosine-3'-phosphate
  modified_base 13: mod_base = OTHER; note = adenosine-3'-phosphate
  modified_base 14: mod_base = OTHER; note = adenosine-3'-phosphate
  modified_base 15: mod_base = OTHER; note = guanosine-3'-phosphate
  modified_base 16: mod_base = OTHER; note = uridine-3'-phosphate
  modified_base 17: mod_base = OTHER; note = guanosine-3'-phosphate
  modified_base 18: mod_base = OTHER; note = 2'-O-methylcytidine-3'-phosphate
  modified_base 19: mod_base = OTHER; note = adenosine-3'-phosphate
  modified_base 20: mod_base = OTHER; note = 2'-deoxythymidine-3'-phosphorothioate
  misc_feature 1..19: note = RNA
  misc_feature 20..21: note = DNA
atctgtgatctgaagtgcatt

SEQ ID NO: 623 - DNA, 21 bp, synthetic construct
  source 1..21: mol_type = other DNA
  modified_base 1: mod_base = OTHER; note = guanosine-3'-phosphate
  modified_base 2: mod_base = OTHER; note = 2'-O-methylcytidine-3'-phosphate
  modified_base 3: mod_base = OTHER; note = adenosine-3'-phosphate
  modified_base 4: mod_base = OTHER; note = 2'-O-methylcytidine-3'-phosphate
  modified_base 5: mod_base = OTHER; note = 2'-O-methyluridine-3'-phosphate
  modified_base 6: mod_base = OTHER; note = 2'-O-methyluridine-3'-phosphate
  modified_base 7: mod_base = OTHER; note = 2'-O-methylcytidine-3'-phosphate
  modified_base 8: mod_base = OTHER; note = adenosine-3'-phosphate
  modified_base 9: mod_base = OTHER; note = guanosine-3'-phosphate
  modified_base 10: mod_base = OTHER; note = adenosine-3'-phosphate
  modified_base 11: mod_base = OTHER; note = 2'-O-methyluridine-3'-phosphate
  modified_base 12: mod_base = OTHER; note = 2'-O-methylcytidine-3'-phosphate
  modified_base 13: mod_base = OTHER; note = adenosine-3'-phosphate
  modified_base 14: mod_base = OTHER; note = 2'-O-methylcytidine-3'-phosphate
  modified_base 15: mod_base = OTHER; note = adenosine-3'-phosphate
  modified_base 16: mod_base = OTHER; note = guanosine-3'-phosphate
  modified_base 17: mod_base = OTHER; note = adenosine-3'-phosphate
  modified_base 18: mod_base = OTHER; note = 2'-O-methyluridine-3'-phosphate
  modified_base 19: mod_base = OTHER; note = guanosine-3'-phosphate
  modified_base 20: mod_base = OTHER; note = 2'-deoxythymidine-3'-phosphorothioate
  misc_feature 1..19: note = RNA
  misc_feature 20..21: note = DNA
gcacttcagatcacagatgtt

SEQ ID NO: 624 - DNA, 21 bp, synthetic construct
  source 1..21: mol_type = other DNA
  modified_base 1: mod_base = OTHER; note = 2'-O-methylcytidine-3'-phosphate
  modified_base 2: mod_base = OTHER; note = adenosine-3'-phosphate
  modified_base 3: mod_base = OTHER; note = uridine-3'-phosphate
  modified_base 4: mod_base = OTHER; note = cytidine-3'-phosphate
  modified_base 5: mod_base = OTHER; note = uridine-3'-phosphate
  modified_base 6: mod_base = OTHER; note = guanosine-3'-phosphate
  modified_base 7: mod_base = OTHER; note = uridine-3'-phosphate
  modified_base 8: mod_base = OTHER; note = guanosine-3'-phosphate
  modified_base 9: mod_base = OTHER; note = adenosine-3'-phosphate
  modified_base 10: mod_base = OTHER; note = uridine-3'-phosphate
  modified_base 11: mod_base = OTHER; note = cytidine-3'-phosphate
  modified_base 12: mod_base = OTHER; note = uridine-3'-phosphate
  modified_base 13: mod_base = OTHER; note = guanosine-3'-phosphate
  modified_base 14: mod_base = OTHER; note = adenosine-3'-phosphate
  modified_base 15: mod_base = OTHER; note = adenosine-3'-phosphate
  modified_base 16: mod_base = OTHER; note = guanosine-3'-phosphate
  modified_base 17: mod_base = OTHER; note = uridine-3'-phosphate
  modified_base 18: mod_base = OTHER; note = guanosine-3'-phosphate
  modified_base 19: mod_base = OTHER; note = cytidine-3'-phosphate
  modified_base 20: mod_base = OTHER; note = 2'-deoxythymidine-3'-phosphorothioate
  misc_feature 1..19: note = RNA
  misc_feature 20..21: note = DNA
catctgtgatctgaagtgctt

SEQ ID NO: 625 - DNA, 21 bp, synthetic construct
  source 1..21: mol_type = other DNA
  modified_base 1: mod_base = OTHER; note = adenosine-3'-phosphate
  modified_base 2: mod_base = OTHER; note = adenosine-3'-phosphate
  modified_base 3: mod_base = OTHER; note = adenosine-3'-phosphate
  modified_base 4: mod_base = OTHER; note = 2'-O-methyluridine-3'-phosphate
  modified_base 5: mod_base = OTHER; note = 2'-O-methyluridine-3'-phosphate
  modified_base 6: mod_base = OTHER; note = guanosine-3'-phosphate
  modified_base 7: mod_base = OTHER; note = 2'-O-methylcytidine-3'-phosphate
  modified_base 8: mod_base = OTHER; note = adenosine-3'-phosphate
  modified_base 9: mod_base = OTHER; note = guanosine-3'-phosphate
  modified_base 10: mod_base = OTHER; note = guanosine-3'-phosphate
  modified_base 11: mod_base = OTHER; note = adenosine-3'-phosphate
  modified_base 12: mod_base = OTHER; note = 2'-O-methyluridine-3'-phosphate
  modified_base 13: mod_base = OTHER; note = guanosine-3'-phosphate
  modified_base 14: mod_base = OTHER; note = 2'-O-methylcytidine-3'-phosphate
  modified_base 15: mod_base = OTHER; note = adenosine-3'-phosphate
  modified_base 16: mod_base = OTHER; note = guanosine-3'-phosphate
  modified_base 17: mod_base = OTHER; note = guanosine-3'-phosphate
  modified_base 18: mod_base = OTHER; note = guanosine-3'-phosphate
  modified_base 19: mod_base = OTHER; note = guanosine-3'-phosphate
  modified_base 20: mod_base = OTHER; note = 2'-deoxythymidine-3'-phosphorothioate
  misc_feature 1..19: note = RNA
  misc_feature 20..21: note = DNA
aaattgcaggatgcaggggtt

SEQ ID NO: 626 - DNA, 21 bp, synthetic construct
  source 1..21: mol_type = other DNA
  modified_base 1: mod_base = OTHER; note = cytidine-3'-phosphate
  modified_base 2: mod_base = OTHER; note = cytidine-3'-phosphate
  modified_base 3: mod_base = OTHER; note = cytidine-3'-phosphate
  modified_base 4: mod_base = OTHER; note = cytidine-3'-phosphate
  modified_base 5: mod_base = OTHER; note = uridine-3'-phosphate
  modified_base 6: mod_base = OTHER; note = guanosine-3'-phosphate
  modified_base 7: mod_base = OTHER; note = 2'-O-methylcytidine-3'-phosphate
  modified_base 8: mod_base = OTHER; note = adenosine-3'-phosphate
  modified_base 9: mod_base = OTHER; note = uridine-3'-phosphate
  modified_base 10: mod_base = OTHER; note = cytidine-3'-phosphate
  modified_base 11: mod_base = OTHER; note = cytidine-3'-phosphate
  modified_base 12: mod_base = OTHER; note = uridine-3'-phosphate
  modified_base 13: mod_base = OTHER; note = guanosine-3'-phosphate
  modified_base 14: mod_base = OTHER; note = 2'-O-methylcytidine-3'-phosphate
  modified_base 15: mod_base = OTHER; note = adenosine-3'-phosphate
  modified_base 16: mod_base = OTHER; note = adenosine-3'-phosphate
  modified_base 17: mod_base = OTHER; note = uridine-3'-phosphate
  modified_base 18: mod_base = OTHER; note = uridine-3'-phosphate
  modified_base 19: mod_base = OTHER; note = uridine-3'-phosphate
  modified_base 20: mod_base = OTHER; note = 2'-deoxythymidine-3'-phosphorothioate
  misc_feature 1..19: note = RNA
  misc_feature 20..21: note = DNA
cccctgcatcctgcaattttt

SEQ ID NO: 627 - DNA, 21 bp, synthetic construct
  source 1..21: mol_type = other DNA
  modified_base 1: mod_base = OTHER; note = 2'-O-methylcytidine-3'-phosphate
  modified_base 2: mod_base = OTHER; note = adenosine-3'-phosphate
  modified_base 3: mod_base = OTHER; note = guanosine-3'-phosphate
  modified_base 4: mod_base = OTHER; note = guanosine-3'-phosphate
  modified_base 5: mod_base = OTHER; note = adenosine-3'-phosphate
  modified_base 6: mod_base = OTHER; note = 2'-O-methyluridine-3'-phosphate
  modified_base 7: mod_base = OTHER; note = guanosine-3'-phosphate
  modified_base 8: mod_base = OTHER; note = 2'-O-methylcytidine-3'-phosphate
  modified_base 9: mod_base = OTHER; note = adenosine-3'-phosphate
  modified_base 10: mod_base = OTHER; note = guanosine-3'-phosphate
  modified_base 11: mod_base = OTHER; note = guanosine-3'-phosphate
  modified_base 12: mod_base = OTHER; note = guanosine-3'-phosphate
  modified_base 13: mod_base = OTHER; note = guanosine-3'-phosphate
  modified_base 14: mod_base = OTHER; note = 2'-O-methyluridine-3'-phosphate
  modified_base 15: mod_base = OTHER; note = guanosine-3'-phosphate
  modified_base 16: mod_base = OTHER; note = 2'-O-methyluridine-3'-phosphate
  modified_base 17: mod_base = OTHER; note = adenosine-3'-phosphate
  modified_base 18: mod_base = OTHER; note = 2'-O-methylcytidine-3'-phosphate
  modified_base 19: mod_base = OTHER; note = 2'-O-methylcytidine-3'-phosphate
  modified_base 20: mod_base = OTHER; note = 2'-deoxythymidine-3'-phosphorothioate
  misc_feature 1..19: note = RNA
  misc_feature 20..21: note = DNA
caggatgcaggggtgtacctt

SEQ ID NO: 628 - DNA, 21 bp, synthetic construct
  source 1..21: mol_type = other DNA
  modified_base 1: mod_base = OTHER; note = guanosine-3'-phosphate
  modified_base 2: mod_base = OTHER; note = guanosine-3'-phosphate
  modified_base 3: mod_base = OTHER; note = 2'-O-methyluridine-3'-phosphate
  modified_base 4: mod_base = OTHER; note = adenosine-3'-phosphate
  modified_base 5: mod_base = OTHER; note = 2'-O-methylcytidine-3'-phosphate
  modified_base 6: mod_base = OTHER; note = adenosine-3'-phosphate
  modified_base 7: mod_base = OTHER; note = cytidine-3'-phosphate
  modified_base 8: mod_base = OTHER; note = cytidine-3'-phosphate
  modified_base 9: mod_base = OTHER; note = cytidine-3'-phosphate
  modified_base 10: mod_base = OTHER; note = cytidine-3'-phosphate
  modified_base 11: mod_base = OTHER; note = uridine-3'-phosphate
  modified_base 12: mod_base = OTHER; note = guanosine-3'-phosphate
  modified_base 13: mod_base = OTHER; note = 2'-O-methylcytidine-3'-phosphate
  modified_base 14: mod_base = OTHER; note = adenosine-3'-phosphate
  modified_base 15: mod_base = OTHER; note = uridine-3'-phosphate
  modified_base 16: mod_base = OTHER; note = cytidine-3'-phosphate
  modified_base 17: mod_base = OTHER; note = cytidine-3'-phosphate
  modified_base 18: mod_base = OTHER; note = uridine-3'-phosphate
  modified_base 19: mod_base = OTHER; note = guanosine-3'-phosphate
  modified_base 20: mod_base = OTHER; note = 2'-deoxythymidine-3'-phosphorothioate
  misc_feature 1..19: note = RNA
  misc_feature 20..21: note = DNA
ggtacacccctgcatcctgtt

SEQ ID NO: 629 - DNA, 21 bp, synthetic construct
  source 1..21: mol_type = other DNA
  modified_base 1: mod_base = OTHER; note = guanosine-3'-phosphate
  modified_base 2: mod_base = OTHER; note = guanosine-3'-phosphate
  modified_base 3: mod_base = OTHER; note = adenosine-3'-phosphate
  modified_base 4: mod_base = OTHER; note = 2'-O-methyluridine-3'-phosphate
  modified_base 5: mod_base = OTHER; note = guanosine-3'-phosphate
  modified_base 6: mod_base = OTHER; note = 2'-O-methylcytidine-3'-phosphate
  modified_base 7: mod_base = OTHER; note = adenosine-3'-phosphate
  modified_base 8: mod_base = OTHER; note = guanosine-3'-phosphate
  modified_base 9: mod_base = OTHER; note = guanosine-3'-phosphate
  modified_base 10: mod_base = OTHER; note = guanosine-3'-phosphate
  modified_base 11: mod_base = OTHER; note = guanosine-3'-phosphate
  modified_base 12: mod_base = OTHER; note = 2'-O-methyluridine-3'-phosphate
  modified_base 13: mod_base = OTHER; note = guanosine-3'-phosphate
  modified_base 14: mod_base = OTHER; note = 2'-O-methyluridine-3'-phosphate
  modified_base 15: mod_base = OTHER; note = adenosine-3'-phosphate
  modified_base 16: mod_base = OTHER; note = 2'-O-methylcytidine-3'-phosphate
  modified_base 17: mod_base = OTHER; note = 2'-O-methylcytidine-3'-phosphate
  modified_base 18: mod_base = OTHER; note = guanosine-3'-phosphate
  modified_base 19: mod_base = OTHER; note = 2'-O-methylcytidine-3'-phosphate
  modified_base 20: mod_base = OTHER; note = 2'-deoxythymidine-3'-phosphorothioate
  misc_feature 1..19: note = RNA
  misc_feature 20..21: note = DNA
ggatgcaggggtgtaccgctt

SEQ ID NO: 630 - DNA, 21 bp, synthetic construct
  source 1..21: mol_type = other DNA
  modified_base 1: mod_base = OTHER; note = guanosine-3'-phosphate
  modified_base 2: mod_base = OTHER; note = cytidine-3'-phosphate
  modified_base 3: mod_base = OTHER; note = guanosine-3'-phosphate
  modified_base 4: mod_base = OTHER; note = guanosine-3'-phosphate
  modified_base 5: mod_base = OTHER; note = 2'-O-methyluridine-3'-phosphate
  modified_base 6: mod_base = OTHER; note = adenosine-3'-phosphate
  modified_base 7: mod_base = OTHER; note = 2'-O-methylcytidine-3'-phosphate
  modified_base 8: mod_base = OTHER; note = adenosine-3'-phosphate
  modified_base 9: mod_base = OTHER; note = cytidine-3'-phosphate
  modified_base 10: mod_base = OTHER; note = cytidine-3'-phosphate
  modified_base 11: mod_base = OTHER; note = cytidine-3'-phosphate
  modified_base 12: mod_base = OTHER; note = cytidine-3'-phosphate
  modified_base 13: mod_base = OTHER; note = uridine-3'-phosphate
  modified_base 14: mod_base = OTHER; note = guanosine-3'-phosphate
  modified_base 15: mod_base = OTHER; note = 2'-O-methylcytidine-3'-phosphate
  modified_base 16: mod_base = OTHER; note = adenosine-3'-phosphate
  modified_base 17: mod_base = OTHER; note = uridine-3'-phosphate
  modified_base 18: mod_base = OTHER; note = cytidine-3'-phosphate
  modified_base 19: mod_base = OTHER; note = cytidine-3'-phosphate
  modified_base 20: mod_base = OTHER; note = 2'-deoxythymidine-3'-phosphorothioate
  misc_feature 1..19: note = RNA
  misc_feature 20..21: note = DNA
gcggtacacccctgcatcctt

SEQ ID NO: 631 - DNA, 21 bp, synthetic construct
  source 1..21: mol_type = other DNA
  modified_base 1: mod_base = OTHER; note = guanosine-3'-phosphate
  modified_base 2: mod_base = OTHER; note = 2'-O-methyluridine-3'-phosphate
  modified_base 3: mod_base = OTHER; note = adenosine-3'-phosphate
  modified_base 4: mod_base = OTHER; note = 2'-O-methylcytidine-3'-phosphate
  modified_base 5: mod_base = OTHER; note = 2'-O-methylcytidine-3'-phosphate
  modified_base 6: mod_base = OTHER; note = guanosine-3'-phosphate
  modified_base 7: mod_base = OTHER; note = 2'-O-methylcytidine-3'-phosphate
  modified_base 8: mod_base = OTHER; note = 2'-O-methyluridine-3'-phosphate
  modified_base 9: mod_base = OTHER; note = guanosine-3'-phosphate
  modified_base 10: mod_base = OTHER; note = 2'-O-methylcytidine-3'-phosphate
  modified_base 11: mod_base = OTHER; note = adenosine-3'-phosphate
  modified_base 12: mod_base = OTHER; note = 2'-O-methyluridine-3'-phosphate
  modified_base 13: mod_base = OTHER; note = guanosine-3'-phosphate
  modified_base 14: mod_base = OTHER; note = adenosine-3'-phosphate
  modified_base 15: mod_base = OTHER; note = 2'-O-methyluridine-3'-phosphate
  modified_base 16: mod_base = OTHER; note = 2'-O-methylcytidine-3'-phosphate
  modified_base 17: mod_base = OTHER; note = adenosine-3'-phosphate
  modified_base 18: mod_base = OTHER; note = guanosine-3'-phosphate
  modified_base 19: mod_base = OTHER; note = 2'-O-methylcytidine-3'-phosphate
  modified_base 20: mod_base = OTHER; note = 2'-deoxythymidine-3'-phosphorothioate
  misc_feature 1..19: note = RNA
  misc_feature 20..21: note = DNA
gtaccgctgcatgatcagctt

SEQ ID NO: 632 - DNA, 21 bp, synthetic construct
  source 1..21: mol_type = other DNA
  modified_base 1: mod_base = OTHER; note = guanosine-3'-phosphate
  modified_base 2: mod_base = OTHER; note = cytidine-3'-phosphate
  modified_base 3: mod_base = OTHER; note = uridine-3'-phosphate
  modified_base 4: mod_base = OTHER; note = guanosine-3'-phosphate
  modified_base 5: mod_base = OTHER; note = adenosine-3'-phosphate
  modified_base 6: mod_base = OTHER; note = uridine-3'-phosphate
  modified_base 7: mod_base = OTHER; note = 2'-O-methylcytidine-3'-phosphate
  modified_base 8: mod_base = OTHER; note = adenosine-3'-phosphate
  modified_base 9: mod_base = OTHER; note = uridine-3'-phosphate
  modified_base 10: mod_base = OTHER; note = guanosine-3'-phosphate
  modified_base 11: mod_base = OTHER; note = 2'-O-methylcytidine-3'-phosphate
  modified_base 12: mod_base = OTHER; note = adenosine-3'-phosphate
  modified_base 13: mod_base = OTHER; note = guanosine-3'-phosphate
  modified_base 14: mod_base = OTHER; note = cytidine-3'-phosphate
  modified_base 15: mod_base = OTHER; note = guanosine-3'-phosphate
  modified_base 16: mod_base = OTHER; note = guanosine-3'-phosphate
  modified_base 17: mod_base = OTHER; note = 2'-O-methyluridine-3'-phosphate
  modified_base 18: mod_base = OTHER; note = adenosine-3'-phosphate
  modified_base 19: mod_base = OTHER; note = cytidine-3'-phosphate
  modified_base 20: mod_base = OTHER; note = 2'-deoxythymidine-3'-phosphorothioate
  misc_feature 1..19: note = RNA
  misc_feature 20..21: note = DNA
gctgatcatgcagcggtactt

SEQ ID NO: 633 - DNA, 21 bp, synthetic construct
  source 1..21: mol_type = other DNA
  modified_base 1: mod_base = OTHER; note = adenosine-3'-phosphate
  modified_base 2: mod_base = OTHER; note = 2'-O-methylcytidine-3'-phosphate
  modified_base 3: mod_base = OTHER; note = 2'-O-methylcytidine-3'-phosphate
  modified_base 4: mod_base = OTHER; note = guanosine-3'-phosphate
  modified_base 5: mod_base = OTHER; note = 2'-O-methylcytidine-3'-phosphate
  modified_base 6: mod_base = OTHER; note = 2'-O-methyluridine-3'-phosphate
  modified_base 7: mod_base = OTHER; note = guanosine-3'-phosphate
  modified_base 8: mod_base = OTHER; note = 2'-O-methylcytidine-3'-phosphate
  modified_base 9: mod_base = OTHER; note = adenosine-3'-phosphate
  modified_base 10: mod_base = OTHER; note = 2'-O-methyluridine-3'-phosphate
  modified_base 11: mod_base = OTHER; note = guanosine-3'-phosphate
  modified_base 12: mod_base = OTHER; note = adenosine-3'-phosphate
  modified_base 13: mod_base = OTHER; note = 2'-O-methyluridine-3'-phosphate
  modified_base 14: mod_base = OTHER; note = 2'-O-methylcytidine-3'-phosphate
  modified_base 15: mod_base = OTHER; note = adenosine-3'-phosphate
  modified_base 16: mod_base = OTHER; note = guanosine-3'-phosphate
  modified_base 17: mod_base = OTHER; note = 2'-O-methylcytidine-3'-phosphate
  modified_base 18: mod_base = OTHER; note = 2'-O-methyluridine-3'-phosphate
  modified_base 19: mod_base = OTHER; note = adenosine-3'-phosphate
  modified_base 20: mod_base = OTHER; note = 2'-deoxythymidine-3'-phosphorothioate
  misc_feature 1..19: note = RNA
  misc_feature 20..21: note = DNA
accgctgcatgatcagctatt

SEQ ID NO: 634 - DNA, 21 bp, synthetic construct
  source 1..21: mol_type = other DNA
  modified_base 1: mod_base = OTHER; note = 2'-O-methyluridine-3'-phosphate
  modified_base 2: mod_base = OTHER; note = adenosine-3'-phosphate
  modified_base 3: mod_base = OTHER; note = guanosine-3'-phosphate
  modified_base 4: mod_base = OTHER; note = cytidine-3'-phosphate
  modified_base 5: mod_base = OTHER; note = uridine-3'-phosphate
  modified_base 6: mod_base = OTHER; note = guanosine-3'-phosphate
  modified_base 7: mod_base = OTHER; note = adenosine-3'-phosphate
  modified_base 8: mod_base = OTHER; note = uridine-3'-phosphate
  modified_base 9: mod_base = OTHER; note = 2'-O-methylcytidine-3'-phosphate
  modified_base 10: mod_base = OTHER; note = adenosine-3'-phosphate
  modified_base 11: mod_base = OTHER; note = uridine-3'-phosphate
  modified_base 12: mod_base = OTHER; note = guanosine-3'-phosphate
  modified_base 13: mod_base = OTHER; note = 2'-O-methylcytidine-3'-phosphate
  modified_base 14: mod_base = OTHER; note = adenosine-3'-phosphate
  modified_base 15: mod_base = OTHER; note = guanosine-3'-phosphate
  modified_base 16: mod_base = OTHER; note = cytidine-3'-phosphate
  modified_base 17: mod_base = OTHER; note = guanosine-3'-phosphate
  modified_base 18: mod_base = OTHER; note = guanosine-3'-phosphate
  modified_base 19: mod_base = OTHER; note = uridine-3'-phosphate
  modified_base 20: mod_base = OTHER; note = 2'-deoxythymidine-3'-phosphorothioate
  misc_feature 1..19: note = RNA
  misc_feature 20..21: note = DNA
tagctgatcatgcagcggttt

SEQ ID NO: 635 - DNA, 21 bp, synthetic construct
  source 1..21: mol_type = other DNA
  modified_base 1: mod_base = OTHER; note = adenosine-3'-phosphate
  modified_base 2: mod_base = OTHER; note = 2'-O-methyluridine-3'-phosphate
  modified_base 3: mod_base = OTHER; note = guanosine-3'-phosphate
  modified_base 4: mod_base = OTHER; note = adenosine-3'-phosphate
  modified_base 5: mod_base = OTHER; note = 2'-O-methyluridine-3'-phosphate
  modified_base 6: mod_base = OTHER; note = 2'-O-methylcytidine-3'-phosphate
  modified_base 7: mod_base = OTHER; note = adenosine-3'-phosphate
  modified_base 8: mod_base = OTHER; note = guanosine-3'-phosphate
  modified_base 9: mod_base = OTHER; note = 2'-O-methylcytidine-3'-phosphate
  modified_base 10: mod_base = OTHER; note = 2'-O-methyluridine-3'-phosphate
  modified_base 11: mod_base = OTHER; note = adenosine-3'-phosphate
  modified_base 12: mod_base = OTHER; note = 2'-O-methyluridine-3'-phosphate
  modified_base 13: mod_base = OTHER; note = guanosine-3'-phosphate
  modified_base 14: mod_base = OTHER; note = guanosine-3'-phosphate
  modified_base 15: mod_base = OTHER; note = 2'-O-methyluridine-3'-phosphate
  modified_base 16: mod_base = OTHER; note = guanosine-3'-phosphate
  modified_base 17: mod_base = OTHER; note = guanosine-3'-phosphate
  modified_base 18: mod_base = OTHER; note = 2'-O-methyluridine-3'-phosphate
  modified_base 19: mod_base = OTHER; note = guanosine-3'-phosphate
  modified_base 20: mod_base = OTHER; note = 2'-deoxythymidine-3'-phosphorothioate
  misc_feature 1..19: note = RNA
  misc_feature 20..21: note = DNA
atgatcagctatggtggtgtt

SEQ ID NO: 636 - DNA, 21 bp, synthetic construct
  source 1..21: mol_type = other DNA
  modified_base 1: mod_base = OTHER; note = 2'-O-methylcytidine-3'-phosphate
  modified_base 2: mod_base = OTHER; note = adenosine-3'-phosphate
  modified_base 3: mod_base = OTHER; note = cytidine-3'-phosphate
  modified_base 4: mod_base = OTHER; note = 2'-O-methylcytidine-3'-phosphate
  modified_base 5: mod_base = OTHER; note = adenosine-3'-phosphate
  modified_base 6: mod_base = OTHER; note = cytidine-3'-phosphate
  modified_base 7: mod_base = OTHER; note = 2'-O-methylcytidine-3'-phosphate
  modified_base 8: mod_base = OTHER; note = adenosine-3'-phosphate
  modified_base 9: mod_base = OTHER; note = 2'-O-methyluridine-3'-phosphate
  modified_base 10: mod_base = OTHER; note = adenosine-3'-phosphate
  modified_base 11: mod_base = OTHER; note = guanosine-3'-phosphate
  modified_base 12: mod_base = OTHER; note = cytidine-3'-phosphate
  modified_base 13: mod_base = OTHER; note = uridine-3'-phosphate
  modified_base 14: mod_base = OTHER; note = guanosine-3'-phosphate
  modified_base 15: mod_base = OTHER; note = adenosine-3'-phosphate
  modified_base 16: mod_base = OTHER; note = uridine-3'-phosphate
  modified_base 17: mod_base = OTHER; note = 2'-O-methylcytidine-3'-phosphate
  modified_base 18: mod_base = OTHER; note = adenosine-3'-phosphate
  modified_base 19: mod_base = OTHER; note = uridine-3'-phosphate
  modified_base 20: mod_base = OTHER; note = 2'-deoxythymidine-3'-phosphorothioate
  misc_feature 1..19: note = RNA
  misc_feature 20..21: note = DNA
caccaccatagctgatcattt

SEQ ID NO: 637 - DNA, 21 bp, synthetic construct
  source 1..21: mol_type = other DNA
  modified_base 1: mod_base = OTHER; note = guanosine-3'-phosphate
  modified_base 2: mod_base = OTHER; note = 2'-O-methylcytidine-3'-phosphate
  modified_base 3: mod_base = OTHER; note = 2'-O-methyluridine-3'-phosphate
  modified_base 4: mod_base = OTHER; note = adenosine-3'-phosphate
  modified_base 5: mod_base = OTHER; note = 2'-O-methyluridine-3'-phosphate
  modified_base 6: mod_base = OTHER; note = guanosine-3'-phosphate
  modified_base 7: mod_base = OTHER; note = guanosine-3'-phosphate
  modified_base 8: mod_base = OTHER; note = 2'-O-methyluridine-3'-phosphate
  modified_base 9: mod_base = OTHER; note = guanosine-3'-phosphate
  modified_base 10: mod_base = OTHER; note = guanosine-3'-phosphate
  modified_base 11: mod_base = OTHER; note = 2'-O-methyluridine-3'-phosphate
  modified_base 12: mod_base = OTHER; note = guanosine-3'-phosphate
  modified_base 13: mod_base = OTHER; note = 2'-O-methylcytidine-3'-phosphate
  modified_base 14: mod_base = OTHER; note = 2'-O-methylcytidine-3'-phosphate
  modified_base 15: mod_base = OTHER; note = guanosine-3'-phosphate
  modified_base 16: mod_base = OTHER; note = adenosine-3'-phosphate
  modified_base 17: mod_base = OTHER; note = 2'-O-methylcytidine-3'-phosphate
  modified_base 18: mod_base = OTHER; note = 2'-O-methyluridine-3'-phosphate
  modified_base 19: mod_base = OTHER; note = adenosine-3'-phosphate
  modified_base 20: mod_base = OTHER; note = 2'-deoxythymidine-3'-phosphorothioate
  misc_feature 1..19: note = RNA
  misc_feature 20..21: note = DNA
gctatggtggtgccgactatt

SEQ ID NO: 638 - DNA, 21 bp, synthetic construct
  source 1..21: mol_type = other DNA
  modified_base 1: mod_base = OTHER; note = 2'-O-methyluridine-3'-phosphate
  modified_base 2: mod_base = OTHER; note = adenosine-3'-phosphate
  modified_base 3: mod_base = OTHER; note = guanosine-3'-phosphate
  modified_base 4: mod_base = OTHER; note = uridine-3'-phosphate
  modified_base 5: mod_base = OTHER; note = cytidine-3'-phosphate
  modified_base 6: mod_base = OTHER; note = guanosine-3'-phosphate
  modified_base 7: mod_base = OTHER; note = guanosine-3'-phosphate
  modified_base 8: mod_base = OTHER; note = 2'-O-methylcytidine-3'-phosphate
  modified_base 9: mod_base = OTHER; note = adenosine-3'-phosphate
  modified_base 10: mod_base = OTHER; note = cytidine-3'-phosphate
  modified_base 11: mod_base = OTHER; note = 2'-O-methylcytidine-3'-phosphate
  modified_base 12: mod_base = OTHER; note = adenosine-3'-phosphate
  modified_base 13: mod_base = OTHER; note = cytidine-3'-phosphate
  modified_base 14: mod_base = OTHER; note = 2'-O-methylcytidine-3'-phosphate
  modified_base 15: mod_base = OTHER; note = adenosine-3'-phosphate
  modified_base 16: mod_base = OTHER; note = 2'-O-methyluridine-3'-phosphate
  modified_base 17: mod_base = OTHER; note = adenosine-3'-phosphate
  modified_base 18: mod_base = OTHER; note = guanosine-3'-phosphate
  modified_base 19: mod_base = OTHER; note = cytidine-3'-phosphate
  modified_base 20: mod_base = OTHER; note = 2'-deoxythymidine-3'-phosphorothioate
  misc_feature 1..19: note = RNA
  misc_feature 20..21: note = DNA
tagtcggcaccaccatagctt

SEQ ID NO: 639 - DNA, 21 bp, synthetic construct
  source 1..21: mol_type = other DNA
  modified_base 1: mod_base = OTHER; note = 2'-O-methyluridine-3'-phosphate
  modified_base 2: mod_base = OTHER; note = guanosine-3'-phosphate
  modified_base 3: mod_base = OTHER; note = 2'-O-methylcytidine-3'-phosphate
  modified_base 4: mod_base = OTHER; note = 2'-O-methylcytidine-3'-phosphate
  modified_base 5: mod_base = OTHER; note = guanosine-3'-phosphate
  modified_base 6: mod_base = OTHER; note = adenosine-3'-phosphate
  modified_base 7: mod_base = OTHER; note = 2'-O-methylcytidine-3'-phosphate
  modified_base 8: mod_base = OTHER; note = 2'-O-methyluridine-3'-phosphate
  modified_base 9: mod_base = OTHER; note = adenosine-3'-phosphate
  modified_base 10: mod_base = OTHER; note = 2'-O-methylcytidine-3'-phosphate
  modified_base 11: mod_base = OTHER; note = adenosine-3'-phosphate
  modified_base 12: mod_base = OTHER; note = adenosine-3'-phosphate
  modified_base 13: mod_base = OTHER; note = guanosine-3'-phosphate
  modified_base 14: mod_base = OTHER; note = 2'-O-methylcytidine-3'-phosphate
  modified_base 15: mod_base = OTHER; note = guanosine-3'-phosphate
  modified_base 16: mod_base = OTHER; note = adenosine-3'-phosphate
  modified_base 17: mod_base = OTHER; note = adenosine-3'-phosphate
  modified_base 18: mod_base = OTHER; note = 2'-O-methyluridine-3'-phosphate
  modified_base 19: mod_base = OTHER; note = 2'-O-methyluridine-3'-phosphate
  modified_base 20: mod_base = OTHER; note = 2'-deoxythymidine-3'-phosphorothioate
  misc_feature 1..19: note = RNA
  misc_feature 20..21: note = DNA
tgccgactacaagcgaatttt

SEQ ID NO: 640 - DNA, 21 bp, synthetic construct
  source 1..21: mol_type = other DNA
  modified_base 1: mod_base = OTHER; note = adenosine-3'-phosphate
  modified_base 2: mod_base = OTHER; note = adenosine-3'-phosphate
  modified_base 3: mod_base = OTHER; note = uridine-3'-phosphate
  modified_base 4: mod_base = OTHER; note = uridine-3'-phosphate
  modified_base 5: mod_base = OTHER; note = cytidine-3'-phosphate
  modified_base 6: mod_base = OTHER; note = guanosine-3'-phosphate
  modified_base 7: mod_base = OTHER; note = cytidine-3'-phosphate
  modified_base 8: mod_base = OTHER; note = uridine-3'-phosphate
  modified_base 9: mod_base = OTHER; note = uridine-3'-phosphate
  modified_base 10: mod_base = OTHER; note = guanosine-3'-phosphate
  modified_base 11: mod_base = OTHER; note = 2'-O-methyluridine-3'-phosphate
  modified_base 12: mod_base = OTHER; note = adenosine-3'-phosphate
  modified_base 13: mod_base = OTHER; note = guanosine-3'-phosphate
  modified_base 14: mod_base = OTHER; note = uridine-3'-phosphate
  modified_base 15: mod_base = OTHER; note = cytidine-3'-phosphate
  modified_base 16: mod_base = OTHER; note = guanosine-3'-phosphate
  modified_base 17: mod_base = OTHER; note = guanosine-3'-phosphate
  modified_base 18: mod_base = OTHER; note = 2'-O-methylcytidine-3'-phosphate
  modified_base 19: mod_base = OTHER; note = adenosine-3'-phosphate
  modified_base 20: mod_base = OTHER; note = 2'-deoxythymidine-3'-phosphorothioate
  misc_feature 1..19: note = RNA
  misc_feature 20..21: note = DNA
aattcgcttgtagtcggcatt

SEQ ID NO: 641 - DNA, 21 bp, synthetic construct
  source 1..21: mol_type = other DNA
  modified_base 1: mod_base = OTHER; note = adenosine-3'-phosphate
  modified_base 2: mod_base = OTHER; note = guanosine-3'-phosphate
  modified_base 3: mod_base = OTHER; note = 2'-O-methylcytidine-3'-phosphate
  modified_base 4: mod_base = OTHER; note = guanosine-3'-phosphate
  modified_base 5: mod_base = OTHER; note = adenosine-3'-phosphate
  modified_base 6: mod_base = OTHER; note = adenosine-3'-phosphate
  modified_base 7: mod_base = OTHER; note = 2'-O-methyluridine-3'-phosphate
  modified_base 8: mod_base = OTHER; note = 2'-O-methyluridine-3'-phosphate
  modified_base 9: mod_base = OTHER; note = adenosine-3'-phosphate
  modified_base 10: mod_base = OTHER; note = 2'-O-methylcytidine-3'-phosphate
  modified_base 11: mod_base = OTHER; note = 2'-O-methyluridine-3'-phosphate
  modified_base 12: mod_base = OTHER; note = guanosine-3'-phosphate
  modified_base 13: mod_base = OTHER; note = 2'-O-methyluridine-3'-phosphate
  modified_base 14: mod_base = OTHER; note = guanosine-3'-phosphate
  modified_base 15: mod_base = OTHER; note = adenosine-3'-phosphate
  modified_base 16: mod_base = OTHER; note = adenosine-3'-phosphate
  modified_base 17: mod_base = OTHER; note = adenosine-3'-phosphate
  modified_base 18: mod_base = OTHER; note = guanosine-3'-phosphate
  modified_base 19: mod_base = OTHER; note = 2'-O-methyluridine-3'-phosphate
  modified_base 20: mod_base = OTHER; note = 2'-deoxythymidine-3'-phosphorothioate
  misc_feature 1..19: note = RNA
  misc_feature 20..21: note = DNA
agcgaattactgtgaaagttt

SEQ ID NO: 642 - DNA, 21 bp, synthetic construct
  source 1..21: mol_type = other DNA
  modified_base 1: mod_base = OTHER; note = adenosine-3'-phosphate
  modified_base 2: mod_base = OTHER; note = cytidine-3'-phosphate
  modified_base 3: mod_base = OTHER; note = uridine-3'-phosphate
  modified_base 4: mod_base = OTHER; note = uridine-3'-phosphate
  modified_base 5: mod_base = OTHER; note = uridine-3'-phosphate
  modified_base 6: mod_base = OTHER; note = 2'-O-methylcytidine-3'-phosphate
  modified_base 7: mod_base = OTHER; note = adenosine-3'-phosphate
  modified_base 8: mod_base = OTHER; note = 2'-O-methylcytidine-3'-phosphate
  modified_base 9: mod_base = OTHER; note = adenosine-3'-phosphate
  modified_base 10: mod_base = OTHER; note = guanosine-3'-phosphate
  modified_base 11: mod_base = OTHER; note = 2'-O-methyluridine-3'-phosphate
  modified_base 12: mod_base = OTHER; note = adenosine-3'-phosphate
  modified_base 13: mod_base = OTHER; note = adenosine-3'-phosphate
  modified_base 14: mod_base = OTHER; note = uridine-3'-phosphate
  modified_base 15: mod_base = OTHER; note = uridine-3'-phosphate
  modified_base 16: mod_base = OTHER; note = cytidine-3'-phosphate
  modified_base 17: mod_base = OTHER; note = guanosine-3'-phosphate
  modified_base 18: mod_base = OTHER; note = cytidine-3'-phosphate
  modified_base 19: mod_base = OTHER; note = uridine-3'-phosphate
  modified_base 20: mod_base = OTHER; note = 2'-deoxythymidine-3'-phosphorothioate
  misc_feature 1..19: note = RNA
  misc_feature 20..21: note = DNA
actttcacagtaattcgcttt

SEQ ID NO: 643 - DNA, 21 bp, synthetic construct
  source 1..21: mol_type = other DNA
  modified_base 1: mod_base = OTHER; note = guanosine-3'-phosphate
  modified_base 2: mod_base = OTHER; note = 2'-O-methylcytidine-3'-phosphate
  modified_base 3: mod_base = OTHER; note = guanosine-3'-phosphate
  modified_base 4: mod_base = OTHER; note = adenosine-3'-phosphate
  modified_base 5: mod_base = OTHER; note = adenosine-3'-phosphate
  modified_base 6: mod_base = OTHER; note = 2'-O-methyluridine-3'-phosphate
  modified_base 7: mod_base = OTHER; note = 2'-O-methyluridine-3'-phosphate
  modified_base 8: mod_base = OTHER; note = adenosine-3'-phosphate
  modified_base 9: mod_base = OTHER; note = 2'-O-methylcytidine-3'-phosphate
  modified_base 10: mod_base = OTHER; note = 2'-O-methyluridine-3'-phosphate
  modified_base 11: mod_base = OTHER; note = guanosine-3'-phosphate
  modified_base 12: mod_base = OTHER; note = 2'-O-methyluridine-3'-phosphate
  modified_base 13: mod_base = OTHER; note = guanosine-3'-phosphate
  modified_base 14: mod_base = OTHER; note = adenosine-3'-phosphate
  modified_base 15: mod_base = OTHER; note = adenosine-3'-phosphate
  modified_base 16: mod_base = OTHER; note = adenosine-3'-phosphate
  modified_base 17: mod_base = OTHER; note = guanosine-3'-phosphate
  modified_base 18: mod_base = OTHER; note = 2'-O-methyluridine-3'-phosphate
  modified_base 19: mod_base = OTHER; note = 2'-O-methylcytidine-3'-phosphate
  modified_base 20: mod_base = OTHER; note = 2'-deoxythymidine-3'-phosphorothioate
  misc_feature 1..19: note = RNA
  misc_feature 20..21: note = DNA
gcgaattactgtgaaagtctt

SEQ ID NO: 644 - DNA, 21 bp, synthetic construct
  source 1..21: mol_type = other DNA
  modified_base 1: mod_base = OTHER; note = guanosine-3'-phosphate
  modified_base 2: mod_base = OTHER; note = adenosine-3'-phosphate
  modified_base 3: mod_base = OTHER; note = cytidine-3'-phosphate
  modified_base 4: mod_base = OTHER; note = uridine-3'-phosphate
  modified_base 5: mod_base = OTHER; note = uridine-3'-phosphate
  modified_base 6: mod_base = OTHER; note = uridine-3'-phosphate
  modified_base 7: mod_base = OTHER; note = 2'-O-methylcytidine-3'-phosphate
  modified_base 8: mod_base = OTHER; note = adenosine-3'-phosphate
  modified_base 9: mod_base = OTHER; note = 2'-O-methylcytidine-3'-phosphate
  modified_base 10: mod_base = OTHER; note = adenosine-3'-phosphate
  modified_base 11: mod_base = OTHER; note = guanosine-3'-phosphate
  modified_base 12: mod_base = OTHER; note = 2'-O-methyluridine-3'-phosphate
  modified_base 13: mod_base = OTHER; note = adenosine-3'-phosphate
  modified_base 14: mod_base = OTHER; note = adenosine-3'-phosphate
  modified_base 15: mod_base = OTHER; note = uridine-3'-phosphate
  modified_base 16: mod_base = OTHER; note = uridine-3'-phosphate
  modified_base 17: mod_base = OTHER; note = cytidine-3'-phosphate
  modified_base 18: mod_base = OTHER; note = guanosine-3'-phosphate
  modified_base 19: mod_base = OTHER; note = cytidine-3'-phosphate
  modified_base 20: mod_base = OTHER; note = 2'-deoxythymidine-3'-phosphorothioate
  misc_feature 1..19: note = RNA
  misc_feature 20..21: note = DNA
gactttcacagtaattcgctt

SEQ ID NO: 645 - DNA, 21 bp, synthetic construct
  source 1..21: mol_type = other DNA
  modified_base 1: mod_base = OTHER; note = 2'-O-methylcytidine-3'-phosphate
  modified_base 2: mod_base = OTHER; note = guanosine-3'-phosphate
  modified_base 3: mod_base = OTHER; note = adenosine-3'-phosphate
  modified_base 4: mod_base = OTHER; note = adenosine-3'-phosphate
  modified_base 5: mod_base = OTHER; note = 2'-O-methyluridine-3'-phosphate
  modified_base 6: mod_base = OTHER; note = 2'-O-methyluridine-3'-phosphate
  modified_base 7: mod_base = OTHER; note = adenosine-3'-phosphate
  modified_base 8: mod_base = OTHER; note = 2'-O-methylcytidine-3'-phosphate
  modified_base 9: mod_base = OTHER; note = 2'-O-methyluridine-3'-phosphate
  modified_base 10: mod_base = OTHER; note = guanosine-3'-phosphate
  modified_base 11: mod_base = OTHER; note = 2'-O-methyluridine-3'-phosphate
  modified_base 12: mod_base = OTHER; note = guanosine-3'-phosphate
  modified_base 13: mod_base = OTHER; note = adenosine-3'-phosphate
  modified_base 14: mod_base = OTHER; note = adenosine-3'-phosphate
  modified_base 15: mod_base = OTHER; note = adenosine-3'-phosphate
  modified_base 16: mod_base = OTHER; note = guanosine-3'-phosphate
  modified_base 17: mod_base = OTHER; note = 2'-O-methyluridine-3'-phosphate
  modified_base 18: mod_base = OTHER; note = 2'-O-methylcytidine-3'-phosphate
  modified_base 19: mod_base = OTHER; note = adenosine-3'-phosphate
  modified_base 20: mod_base = OTHER; note = 2'-deoxythymidine-3'-phosphorothioate
  misc_feature 1..19: note = RNA
  misc_feature 20..21: note = DNA
cgaattactgtgaaagtcatt

SEQ ID NO: 646 - DNA, 21 bp, synthetic construct
  source 1..21: mol_type = other DNA
  modified_base 1: mod_base = OTHER; note = uridine-3'-phosphate
  modified_base 2: mod_base = OTHER; note = guanosine-3'-phosphate
  modified_base 3: mod_base = OTHER; note = adenosine-3'-phosphate
  modified_base 4: mod_base = OTHER; note = cytidine-3'-phosphate
  modified_base 5: mod_base = OTHER; note = uridine-3'-phosphate
  modified_base 6: mod_base = OTHER; note = uridine-3'-phosphate
  modified_base 7: mod_base = OTHER; note = uridine-3'-phosphate
  modified_base 8: mod_base = OTHER; note = 2'-O-methylcytidine-3'-phosphate
  modified_base 9: mod_base = OTHER; note = adenosine-3'-phosphate
  modified_base 10: mod_base = OTHER; note = 2'-O-methylcytidine-3'-phosphate
  modified_base 11: mod_base = OTHER; note = adenosine-3'-phosphate
  modified_base 12: mod_base = OTHER; note = guanosine-3'-phosphate
  modified_base 13: mod_base = OTHER; note = 2'-O-methyluridine-3'-phosphate
  modified_base 14: mod_base = OTHER; note = adenosine-3'-phosphate
  modified_base 15: mod_base = OTHER; note = adenosine-3'-phosphate
  modified_base 16: mod_base = OTHER; note = uridine-3'-phosphate
  modified_base 17: mod_base = OTHER; note = uridine-3'-phosphate
  modified_base 18: mod_base = OTHER; note = cytidine-3'-phosphate
  modified_base 19: mod_base = OTHER; note = guanosine-3'-phosphate
  modified_base 20: mod_base = OTHER; note = 2'-deoxythymidine-3'-phosphorothioate
  misc_feature 1..19: note = RNA
  misc_feature 20..21: note = DNA
tgactttcacagtaattcgtt

SEQ ID NO: 647 - DNA, 21 bp, synthetic construct
  source 1..21: mol_type = other DNA
  modified_base 1: mod_base = OTHER; note = adenosine-3'-phosphate
  modified_base 2: mod_base = OTHER; note = 2'-O-methyluridine-3'-phosphate
  modified_base 3: mod_base = OTHER; note = 2'-O-methyluridine-3'-phosphate
  modified_base 4: mod_base = OTHER; note = adenosine-3'-phosphate
  modified_base 5: mod_base = OTHER; note = 2'-O-methylcytidine-3'-phosphate
  modified_base 6: mod_base = OTHER; note = 2'-O-methyluridine-3'-phosphate
  modified_base 7: mod_base = OTHER; note = guanosine-3'-phosphate
  modified_base 8: mod_base = OTHER; note = 2'-O-methyluridine-3'-phosphate
  modified_base 9: mod_base = OTHER; note = guanosine-3'-phosphate
  modified_base 10: mod_base = OTHER; note = adenosine-3'-phosphate
  modified_base 11: mod_base = OTHER; note = adenosine-3'-phosphate
  modified_base 12: mod_base = OTHER; note = adenosine-3'-phosphate
  modified_base 13: mod_base = OTHER; note = guanosine-3'-phosphate
  modified_base 14: mod_base = OTHER; note = 2'-O-methyluridine-3'-phosphate
  modified_base 15: mod_base = OTHER; note = 2'-O-methylcytidine-3'-phosphate
  modified_base 16: mod_base = OTHER; note = adenosine-3'-phosphate
  modified_base 17: mod_base = OTHER; note = adenosine-3'-phosphate
  modified_base 18: mod_base = OTHER; note = 2'-O-methyluridine-3'-phosphate
  modified_base 19: mod_base = OTHER; note = guanosine-3'-phosphate
  modified_base 20: mod_base = OTHER; note = 2'-deoxythymidine-3'-phosphorothioate
  misc_feature 1..19: note = RNA
  misc_feature 20..21: note = DNA
attactgtgaaagtcaatgtt

SEQ ID NO: 648 - DNA, 21 bp, synthetic construct
  source 1..21: mol_type = other DNA
  modified_base 1: mod_base = OTHER; note = 2'-O-methylcytidine-3'-phosphate
  modified_base 2: mod_base = OTHER; note = adenosine-3'-phosphate
  modified_base 3: mod_base = OTHER; note = uridine-3'-phosphate
  modified_base 4: mod_base = OTHER; note = uridine-3'-phosphate
  modified_base 5: mod_base = OTHER; note = guanosine-3'-phosphate
  modified_base 6: mod_base = OTHER; note = adenosine-3'-phosphate
  modified_base 7: mod_base = OTHER; note = cytidine-3'-phosphate
  modified_base 8: mod_base = OTHER; note = uridine-3'-phosphate
  modified_base 9: mod_base = OTHER; note = uridine-3'-phosphate
  modified_base 10: mod_base = OTHER; note = uridine-3'-phosphate
  modified_base 11: mod_base = OTHER; note = 2'-O-methylcytidine-3'-phosphate
  modified_base 12: mod_base = OTHER; note = adenosine-3'-phosphate
  modified_base 13: mod_base = OTHER; note = 2'-O-methylcytidine-3'-phosphate
  modified_base 14: mod_base = OTHER; note = adenosine-3'-phosphate
  modified_base 15: mod_base = OTHER; note = guanosine-3'-phosphate
  modified_base 16: mod_base = OTHER; note = 2'-O-methyluridine-3'-phosphate
  modified_base 17: mod_base = OTHER; note = adenosine-3'-phosphate
  modified_base 18: mod_base = OTHER; note = adenosine-3'-phosphate
  modified_base 19: mod_base = OTHER; note = uridine-3'-phosphate
  modified_base 20: mod_base = OTHER; note = 2'-deoxythymidine-3'-phosphorothioate
  misc_feature 1..19: note = RNA
  misc_feature 20..21: note = DNA
cattgactttcacagtaattt

SEQ ID NO: 649 - DNA, 21 bp, synthetic construct
  source 1..21: mol_type = other DNA
  modified_base 1: mod_base = OTHER; note = 2'-O-methyluridine-3'-phosphate
  modified_base 2: mod_base = OTHER; note = adenosine-3'-phosphate
  modified_base 3: mod_base = OTHER; note = 2'-O-methylcytidine-3'-phosphate
  modified_base 4: mod_base = OTHER; note = 2'-O-methyluridine-3'-phosphate
  modified_base 5: mod_base = OTHER; note = guanosine-3'-phosphate
  modified_base 6: mod_base = OTHER; note = 2'-O-methyluridine-3'-phosphate
  modified_base 7: mod_base = OTHER; note = guanosine-3'-phosphate
  modified_base 8: mod_base = OTHER; note = adenosine-3'-phosphate
  modified_base 9: mod_base = OTHER; note = adenosine-3'-phosphate
  modified_base 10: mod_base = OTHER; note = adenosine-3'-phosphate
  modified_base 11: mod_base = OTHER; note = guanosine-3'-phosphate
  modified_base 12: mod_base = OTHER; note = 2'-O-methyluridine-3'-phosphate
  modified_base 13: mod_base = OTHER; note = 2'-O-methylcytidine-3'-phosphate
  modified_base 14: mod_base = OTHER; note = adenosine-3'-phosphate
  modified_base 15: mod_base = OTHER; note = adenosine-3'-phosphate
  modified_base 16: mod_base = OTHER; note = 2'-O-methyluridine-3'-phosphate
  modified_base 17: mod_base = OTHER; note = guanosine-3'-phosphate
  modified_base 18: mod_base = OTHER; note = 2'-O-methylcytidine-3'-phosphate
  modified_base 19: mod_base = OTHER; note = 2'-O-methylcytidine-3'-phosphate
  modified_base 20: mod_base = OTHER; note = 2'-deoxythymidine-3'-phosphorothioate
  misc_feature 1..19: note = RNA
  misc_feature 20..21: note = DNA
tactgtgaaagtcaatgcctt

SEQ ID NO: 650 - DNA, 21 bp, synthetic construct
  source 1..21: mol_type = other DNA
  modified_base 1: mod_base = OTHER; note = guanosine-3'-phosphate
  modified_base 2: mod_base = OTHER; note = guanosine-3'-phosphate
  modified_base 3: mod_base = OTHER; note = 2'-O-methylcytidine-3'-phosphate
  modified_base 4: mod_base = OTHER; note = adenosine-3'-phosphate
  modified_base 5: mod_base = OTHER; note = uridine-3'-phosphate
  modified_base 6: mod_base = OTHER; note = uridine-3'-phosphate
  modified_base 7: mod_base = OTHER; note = guanosine-3'-phosphate
  modified_base 8: mod_base = OTHER; note = adenosine-3'-phosphate
  modified_base 9: mod_base = OTHER; note = cytidine-3'-phosphate
  modified_base 10: mod_base = OTHER; note = uridine-3'-phosphate
  modified_base 11: mod_base = OTHER; note = uridine-3'-phosphate
  modified_base 12: mod_base = OTHER; note = uridine-3'-phosphate
  modified_base 13: mod_base = OTHER; note = 2'-O-methylcytidine-3'-phosphate
  modified_base 14: mod_base = OTHER; note = adenosine-3'-phosphate
  modified_base 15: mod_base = OTHER; note = 2'-O-methylcytidine-3'-phosphate
  modified_base 16: mod_base = OTHER; note = adenosine-3'-phosphate
  modified_base 17: mod_base = OTHER; note = guanosine-3'-phosphate
  modified_base 18: mod_base = OTHER; note = 2'-O-methyluridine-3'-phosphate
  modified_base 19: mod_base = OTHER; note = adenosine-3'-phosphate
  modified_base 20: mod_base = OTHER; note = 2'-deoxythymidine-3'-phosphorothioate
  misc_feature 1..19: note = RNA
  misc_feature 20..21: note = DNA
ggcattgactttcacagtatt

SEQ ID NO: 651 - DNA, 21 bp, synthetic construct
  source 1..21: mol_type = other DNA
  modified_base 1: mod_base = OTHER; note = adenosine-3'-phosphate
  modified_base 2: mod_base = OTHER; note = adenosine-3'-phosphate
  modified_base 3: mod_base = OTHER; note = adenosine-3'-phosphate
  modified_base 4: mod_base = OTHER; note = guanosine-3'-phosphate
  modified_base 5: mod_base = OTHER; note = 2'-O-methyluridine-3'-phosphate
  modified_base 6: mod_base = OTHER; note = 2'-O-methylcytidine-3'-phosphate
  modified_base 7: mod_base = OTHER; note = adenosine-3'-phosphate
  modified_base 8: mod_base = OTHER; note = adenosine-3'-phosphate
  modified_base 9: mod_base = OTHER; note = 2'-O-methyluridine-3'-phosphate
  modified_base 10: mod_base = OTHER; note = guanosine-3'-phosphate
  modified_base 11: mod_base = OTHER; note = 2'-O-methylcytidine-3'-phosphate
  modified_base 12: mod_base = OTHER; note = 2'-O-methylcytidine-3'-phosphate
  modified_base 13: mod_base = OTHER; note = 2'-O-methylcytidine-3'-phosphate
  modified_base 14: mod_base = OTHER; note = 2'-O-methylcytidine-3'-phosphate
  modified_base 15: mod_base = OTHER; note = adenosine-3'-phosphate
  modified_base 16: mod_base = OTHER; note = 2'-O-methyluridine-3'-phosphate
  modified_base 17: mod_base = OTHER; note = adenosine-3'-phosphate
  modified_base 18: mod_base = OTHER; note = 2'-O-methylcytidine-3'-phosphate
  modified_base 19: mod_base = OTHER; note = adenosine-3'-phosphate
  modified_base 20: mod_base = OTHER; note = 2'-deoxythymidine-3'-phosphorothioate
  misc_feature 1..19: note = RNA
  misc_feature 20..21: note = DNA
aaagtcaatgccccatacatt

SEQ ID NO: 652 - DNA, 21 bp, synthetic construct
  source 1..21: mol_type = other DNA
  modified_base 1: mod_base = OTHER; note = uridine-3'-phosphate
  modified_base 2: mod_base = OTHER; note = guanosine-3'-phosphate
  modified_base 3: mod_base = OTHER; note = 2'-O-methyluridine-3'-phosphate
  modified_base 4: mod_base = OTHER; note = adenosine-3'-phosphate
  modified_base 5: mod_base = OTHER; note = uridine-3'-phosphate
  modified_base 6: mod_base = OTHER; note = guanosine-3'-phosphate
  modified_base 7: mod_base = OTHER; note = guanosine-3'-phosphate
  modified_base 8: mod_base = OTHER; note = guanosine-3'-phosphate
  modified_base 9: mod_base = OTHER; note = guanosine-3'-phosphate
  modified_base 10: mod_base = OTHER; note = 2'-O-methylcytidine-3'-phosphate
  modified_base 11: mod_base = OTHER; note = adenosine-3'-phosphate
  modified_base 12: mod_base = OTHER; note = uridine-3'-phosphate
  modified_base 13: mod_base = OTHER; note = uridine-3'-phosphate
  modified_base 14: mod_base = OTHER; note = guanosine-3'-phosphate
  modified_base 15: mod_base = OTHER; note = adenosine-3'-phosphate
  modified_base 16: mod_base = OTHER; note = cytidine-3'-phosphate
  modified_base 17: mod_base = OTHER; note = uridine-3'-phosphate
  modified_base 18: mod_base = OTHER; note = uridine-3'-phosphate
  modified_base 19: mod_base = OTHER; note = uridine-3'-phosphate
  modified_base 20: mod_base = OTHER; note = 2'-deoxythymidine-3'-phosphorothioate
  misc_feature 1..19: note = RNA
  misc_feature 20..21: note = DNA
tgtatggggcattgacttttt

SEQ ID NO: 653 - DNA, 21 bp, synthetic construct
  source 1..21: mol_type = other DNA
  modified_base 1: mod_base = OTHER; note = guanosine-3'-phosphate
  modified_base 2: mod_base = OTHER; note = 2'-O-methyluridine-3'-phosphate
  modified_base 3: mod_base = OTHER; note = 2'-O-methylcytidine-3'-phosphate
  modified_base 4: mod_base = OTHER; note = adenosine-3'-phosphate
  modified_base 5: mod_base = OTHER; note = adenosine-3'-phosphate
  modified_base 6: mod_base = OTHER; note = 2'-O-methyluridine-3'-phosphate
  modified_base 7: mod_base = OTHER; note = guanosine-3'-phosphate
  modified_base 8: mod_base = OTHER; note = 2'-O-methylcytidine-3'-phosphate
  modified_base 9: mod_base = OTHER; note = 2'-O-methylcytidine-3'-phosphate
  modified_base 10: mod_base = OTHER; note = 2'-O-methylcytidine-3'-phosphate
  modified_base 11: mod_base = OTHER; note = 2'-O-methylcytidine-3'-phosphate
  modified_base 12: mod_base = OTHER; note = adenosine-3'-phosphate
  modified_base 13: mod_base = OTHER; note = 2'-O-methyluridine-3'-phosphate
  modified_base 14: mod_base = OTHER; note = adenosine-3'-phosphate
  modified_base 15: mod_base = OTHER; note = 2'-O-methylcytidine-3'-phosphate
  modified_base 16: mod_base = OTHER; note = adenosine-3'-phosphate
  modified_base 17: mod_base = OTHER; note = adenosine-3'-phosphate
  modified_base 18: mod_base = OTHER; note = 2'-O-methylcytidine-3'-phosphate
  modified_base 19: mod_base = OTHER; note = adenosine-3'-phosphate
  modified_base 20: mod_base = OTHER; note = 2'-deoxythymidine-3'-phosphorothioate
  misc_feature 1..19: note = RNA
  misc_feature 20..21: note = DNA
gtcaatgccccatacaacatt

SEQ ID NO: 654 - DNA, 21 bp, synthetic construct
  source 1..21: mol_type = other DNA
  modified_base 1: mod_base = OTHER; note = uridine-3'-phosphate
  modified_base 2: mod_base = OTHER; note = guanosine-3'-phosphate
  modified_base 3: mod_base = OTHER; note = uridine-3'-phosphate
  modified_base 4: mod_base = OTHER; note = uridine-3'-phosphate
  modified_base 5: mod_base = OTHER; note = guanosine-3'-phosphate
  modified_base 6: mod_base = OTHER; note = 2'-O-methyluridine-3'-phosphate
  modified_base 7: mod_base = OTHER; note = adenosine-3'-phosphate
  modified_base 8: mod_base = OTHER; note = uridine-3'-phosphate
  modified_base 9: mod_base = OTHER; note = guanosine-3'-phosphate
  modified_base 10: mod_base = OTHER; note = guanosine-3'-phosphate
  modified_base 11: mod_base = OTHER; note = guanosine-3'-phosphate
  modified_base 12: mod_base = OTHER; note = guanosine-3'-phosphate
  modified_base 13: mod_base = OTHER; note = 2'-O-methylcytidine-3'-phosphate
  modified_base 14: mod_base = OTHER; note = adenosine-3'-phosphate
  modified_base 15: mod_base = OTHER; note = uridine-3'-phosphate
  modified_base 16: mod_base = OTHER; note = uridine-3'-phosphate
  modified_base 17: mod_base = OTHER; note = guanosine-3'-phosphate
  modified_base 18: mod_base = OTHER; note = adenosine-3'-phosphate
  modified_base 19: mod_base = OTHER; note = cytidine-3'-phosphate
  modified_base 20: mod_base = OTHER; note = 2'-deoxythymidine-3'-phosphorothioate
  misc_feature 1..19: note = RNA
  misc_feature 20..21: note = DNA
tgttgtatggggcattgactt

SEQ ID NO: 655 - DNA, 21 bp, synthetic construct
  source 1..21: mol_type = other DNA
  modified_base 1: mod_base = OTHER; note = adenosine-3'-phosphate
  modified_base 2: mod_base = OTHER; note = adenosine-3'-phosphate
  modified_base 3: mod_base = OTHER; note = 2'-O-methyluridine-3'-phosphate
  modified_base 4: mod_base = OTHER; note = 2'-O-methyluridine-3'-phosphate
  modified_base 5: mod_base = OTHER; note = 2'-O-methyluridine-3'-phosphate
  modified_base 6: mod_base = OTHER; note = 2'-O-methyluridine-3'-phosphate
  modified_base 7: mod_base = OTHER; note = guanosine-3'-phosphate
  modified_base 8: mod_base = OTHER; note = guanosine-3'-phosphate
  modified_base 9: mod_base = OTHER; note = 2'-O-methyluridine-3'-phosphate
  modified_base 10: mod_base = OTHER; note = 2'-O-methyluridine-3'-phosphate
  modified_base 11: mod_base = OTHER; note = guanosine-3'-phosphate
  modified_base 12: mod_base = OTHER; note = 2'-O-methyluridine-3'-phosphate
  modified_base 13: mod_base = OTHER; note = guanosine-3'-phosphate
  modified_base 14: mod_base = OTHER; note = guanosine-3'-phosphate
  modified_base 15: mod_base = OTHER; note = adenosine-3'-phosphate
  modified_base 16: mod_base = OTHER; note = 2'-O-methyluridine-3'-phosphate
  modified_base 17: mod_base = OTHER; note = 2'-O-methylcytidine-3'-phosphate
  modified_base 18: mod_base = OTHER; note = 2'-O-methylcytidine-3'-phosphate
  modified_base 19: mod_base = OTHER; note = adenosine-3'-phosphate
  modified_base 20: mod_base = OTHER; note = 2'-deoxythymidine-3'-phosphorothioate
  misc_feature 1..19: note = RNA
  misc_feature 20..21: note = DNA
aattttggttgtggatccatt

SEQ ID NO: 656 - DNA, 21 bp, synthetic construct
  source 1..21: mol_type = other DNA
  modified_base 1: mod_base = OTHER; note = uridine-3'-phosphate
  modified_base 2: mod_base = OTHER; note = guanosine-3'-phosphate
  modified_base 3: mod_base = OTHER; note = guanosine-3'-phosphate
  modified_base 4: mod_base = OTHER; note = adenosine-3'-phosphate
  modified_base 5: mod_base = OTHER; note = uridine-3'-phosphate
  modified_base 6: mod_base = OTHER; note = cytidine-3'-phosphate
  modified_base 7: mod_base = OTHER; note = 2'-O-methylcytidine-3'-phosphate
  modified_base 8: mod_base = OTHER; note = adenosine-3'-phosphate
  modified_base 9: mod_base = OTHER; note = 2'-O-methylcytidine-3'-phosphate
  modified_base 10: mod_base = OTHER; note = adenosine-3'-phosphate
  modified_base 11: mod_base = OTHER; note = adenosine-3'-phosphate
  modified_base 12: mod_base = OTHER; note = cytidine-3'-phosphate
  modified_base 13: mod_base = OTHER; note = 2'-O-methylcytidine-3'-phosphate
  modified_base 14: mod_base = OTHER; note = adenosine-3'-phosphate
  modified_base 15: mod_base = OTHER; note = adenosine-3'-phosphate
  modified_base 16: mod_base = OTHER; note = adenosine-3'-phosphate
  modified_base 17: mod_base = OTHER; note = adenosine-3'-phosphate
  modified_base 18: mod_base = OTHER; note = uridine-3'-phosphate
  modified_base 19: mod_base = OTHER; note = uridine-3'-phosphate
  modified_base 20: mod_base = OTHER; note = 2'-deoxythymidine-3'-phosphorothioate
  misc_feature 1..19: note = RNA
  misc_feature 20..21: note = DNA
tggatccacaaccaaaatttt

SEQ ID NO: 657 - DNA, 21 bp, synthetic construct
  source 1..21: mol_type = other DNA
  modified_base 1: mod_base = OTHER; note = adenosine-3'-phosphate
  modified_base 2: mod_base = OTHER; note = 2'-O-methyluridine-3'-phosphate
  modified_base 3: mod_base = OTHER; note = 2'-O-methyluridine-3'-phosphate
  modified_base 4: mod_base = OTHER; note = 2'-O-methyluridine-3'-phosphate
  modified_base 5: mod_base = OTHER; note = 2'-O-methyluridine-3'-phosphate
  modified_base 6: mod_base = OTHER; note = guanosine-3'-phosphate
  modified_base 7: mod_base = OTHER; note = guanosine-3'-phosphate
  modified_base 8: mod_base = OTHER; note = 2'-O-methyluridine-3'-phosphate
  modified_base 9: mod_base = OTHER; note = 2'-O-methyluridine-3'-phosphate
  modified_base 10: mod_base = OTHER; note = guanosine-3'-phosphate
  modified_base 11: mod_base = OTHER; note = 2'-O-methyluridine-3'-phosphate
  modified_base 12: mod_base = OTHER; note = guanosine-3'-phosphate
  modified_base 13: mod_base = OTHER; note = guanosine-3'-phosphate
  modified_base 14: mod_base = OTHER; note = adenosine-3'-phosphate
  modified_base 15: mod_base = OTHER; note = 2'-O-methyluridine-3'-phosphate
  modified_base 16: mod_base = OTHER; note = 2'-O-methylcytidine-3'-phosphate
  modified_base 17: mod_base = OTHER; note = 2'-O-methylcytidine-3'-phosphate
  modified_base 18: mod_base = OTHER; note = adenosine-3'-phosphate
  modified_base 19: mod_base = OTHER; note = guanosine-3'-phosphate
  modified_base 20: mod_base = OTHER; note = 2'-deoxythymidine-3'-phosphorothioate
  misc_feature 1..19: note = RNA
  misc_feature 20..21: note = DNA
attttggttgtggatccagtt

SEQ ID NO: 658 - DNA, 21 bp, synthetic construct
  source 1..21: mol_type = other DNA
  modified_base 1: mod_base = OTHER; note = cytidine-3'-phosphate
  modified_base 2: mod_base = OTHER; note = uridine-3'-phosphate
  modified_base 3: mod_base = OTHER; note = guanosine-3'-phosphate
  modified_base 4: mod_base = OTHER; note = guanosine-3'-phosphate
  modified_base 5: mod_base = OTHER; note = adenosine-3'-phosphate
  modified_base 6: mod_base = OTHER; note = uridine-3'-phosphate
  modified_base 7: mod_base = OTHER; note = cytidine-3'-phosphate
  modified_base 8: mod_base = OTHER; note = 2'-O-methylcytidine-3'-phosphate
  modified_base 9: mod_base = OTHER; note = adenosine-3'-phosphate
  modified_base 10: mod_base = OTHER; note = 2'-O-methylcytidine-3'-phosphate
  modified_base 11: mod_base = OTHER; note = adenosine-3'-phosphate
  modified_base 12: mod_base = OTHER; note = adenosine-3'-phosphate
  modified_base 13: mod_base = OTHER; note = cytidine-3'-phosphate
  modified_base 14: mod_base = OTHER; note = 2'-O-methylcytidine-3'-phosphate
  modified_base 15: mod_base = OTHER; note = adenosine-3'-phosphate
  modified_base 16: mod_base = OTHER; note = adenosine-3'-phosphate
  modified_base 17: mod_base = OTHER; note = adenosine-3'-phosphate
  modified_base 18: mod_base = OTHER; note = adenosine-3'-phosphate
  modified_base 19: mod_base = OTHER; note = uridine-3'-phosphate
  modified_base 20: mod_base = OTHER; note = 2'-deoxythymidine-3'-phosphorothioate
  misc_feature 1..19: note = RNA
  misc_feature 20..21: note = DNA
ctggatccacaaccaaaattt

SEQ ID NO: 659 - DNA, 21 bp, synthetic construct
  source 1..21: mol_type = other DNA
  modified_base 1: mod_base = OTHER; note = adenosine-3'-phosphate
  modified_base 2: mod_base = OTHER; note = guanosine-3'-phosphate
  modified_base 3: mod_base = OTHER; note = 2'-O-methyluridine-3'-phosphate
  modified_base 4: mod_base = OTHER; note = 2'-O-methylcytidine-3'-phosphate
  modified_base 5: mod_base = OTHER; note = adenosine-3'-phosphate
  modified_base 6: mod_base = OTHER; note = 2'-O-methylcytidine-3'-phosphate
  modified_base 7: mod_base = OTHER; note = 2'-O-methylcytidine-3'-phosphate
  modified_base 8: mod_base = OTHER; note = 2'-O-methyluridine-3'-phosphate
  modified_base 9: mod_base = OTHER; note = 2'-O-methylcytidine-3'-phosphate
  modified_base 10: mod_base = OTHER; note = 2'-O-methyluridine-3'-phosphate
  modified_base 11: mod_base = OTHER; note = guanosine-3'-phosphate
  modified_base 12: mod_base = OTHER; note = adenosine-3'-phosphate
  modified_base 13: mod_base = OTHER; note = adenosine-3'-phosphate
  modified_base 14: mod_base = OTHER; note = 2'-O-methylcytidine-3'-phosphate
  modified_base 15: mod_base = OTHER; note = adenosine-3'-phosphate
  modified_base 16: mod_base = OTHER; note = 2'-O-methyluridine-3'-phosphate
  modified_base 17: mod_base = OTHER; note = guanosine-3'-phosphate
  modified_base 18: mod_base = OTHER; note = adenosine-3'-phosphate
  modified_base 19: mod_base = OTHER; note = adenosine-3'-phosphate
  modified_base 20: mod_base = OTHER; note = 2'-deoxythymidine-3'-phosphorothioate
  misc_feature 1..19: note = RNA
  misc_feature 20..21: note = DNA
agtcacctctgaacatgaatt

SEQ ID NO: 660 - DNA, 21 bp, synthetic construct
  source 1..21: mol_type = other DNA
  modified_base 1: mod_base = OTHER; note = uridine-3'-phosphate
  modified_base 2: mod_base = OTHER; note = uridine-3'-phosphate
  modified_base 3: mod_base = OTHER; note = 2'-O-methylcytidine-3'-phosphate
  modified_base 4: mod_base = OTHER; note = adenosine-3'-phosphate
  modified_base 5: mod_base = OTHER; note = uridine-3'-phosphate
  modified_base 6: mod_base = OTHER; note = guanosine-3'-phosphate
  modified_base 7: mod_base = OTHER; note = uridine-3'-phosphate
  modified_base 8: mod_base = OTHER; note = uridine-3'-phosphate
  modified_base 9: mod_base = OTHER; note = 2'-O-methylcytidine-3'-phosphate
  modified_base 10: mod_base = OTHER; note = adenosine-3'-phosphate
  modified_base 11: mod_base = OTHER; note = guanosine-3'-phosphate
  modified_base 12: mod_base = OTHER; note = adenosine-3'-phosphate
  modified_base 13: mod_base = OTHER; note = guanosine-3'-phosphate
  modified_base 14: mod_base = OTHER; note = guanosine-3'-phosphate
  modified_base 15: mod_base = OTHER; note = uridine-3'-phosphate
  modified_base 16: mod_base = OTHER; note = guanosine-3'-phosphate
  modified_base 17: mod_base = OTHER; note = adenosine-3'-phosphate
  modified_base 18: mod_base = OTHER; note = cytidine-3'-phosphate
  modified_base 19: mod_base = OTHER; note = uridine-3'-phosphate
  modified_base 20: mod_base = OTHER; note = 2'-deoxythymidine-3'-phosphorothioate
  misc_feature 1..19: note = RNA
  misc_feature 20..21: note = DNA
ttcatgttcagaggtgacttt

SEQ ID NO: 661 - DNA, 21 bp, synthetic construct
  source 1..21: mol_type = other DNA
  modified_base 1: mod_base = OTHER; note = adenosine-3'-phosphate
  modified_base 2: mod_base = OTHER; note = 2'-O-methylcytidine-3'-phosphate
  modified_base 3: mod_base = OTHER; note = 2'-O-methylcytidine-3'-phosphate
  modified_base 4: mod_base = OTHER; note = 2'-O-methyluridine-3'-phosphate
  modified_base 5: mod_base = OTHER; note = 2'-O-methylcytidine-3'-phosphate
  modified_base 6: mod_base = OTHER; note = 2'-O-methyluridine-3'-phosphate
  modified_base 7: mod_base = OTHER; note = guanosine-3'-phosphate
  modified_base 8: mod_base = OTHER; note = adenosine-3'-phosphate
  modified_base 9: mod_base = OTHER; note = adenosine-3'-phosphate
  modified_base 10: mod_base = OTHER; note = 2'-O-methylcytidine-3'-phosphate
  modified_base 11: mod_base = OTHER; note = adenosine-3'-phosphate
  modified_base 12: mod_base = OTHER; note = 2'-O-methyluridine-3'-phosphate
  modified_base 13: mod_base = OTHER; note = guanosine-3'-phosphate
  modified_base 14: mod_base = OTHER; note = adenosine-3'-phosphate
  modified_base 15: mod_base = OTHER; note = adenosine-3'-phosphate
  modified_base 16: mod_base = OTHER; note = 2'-O-methylcytidine-3'-phosphate
  modified_base 17: mod_base = OTHER; note = 2'-O-methyluridine-3'-phosphate
  modified_base 18: mod_base = OTHER; note = guanosine-3'-phosphate
  modified_base 19: mod_base = OTHER; note = adenosine-3'-phosphate
  modified_base 20: mod_base = OTHER; note = 2'-deoxythymidine-3'-phosphorothioate
  misc_feature 1..19: note = RNA
  misc_feature 20..21: note = DNA
acctctgaacatgaactgatt

SEQ ID NO: 662 - DNA, 21 bp, synthetic construct
  source 1..21: mol_type = other DNA
  modified_base 1: mod_base = OTHER; note = uridine-3'-phosphate
  modified_base 2: mod_base = OTHER; note = 2'-O-methylcytidine-3'-phosphate
  modified_base 3: mod_base = OTHER; note = adenosine-3'-phosphate
  modified_base 4: mod_base = OTHER; note = guanosine-3'-phosphate
  modified_base 5: mod_base = OTHER; note = uridine-3'-phosphate
  modified_base 6: mod_base = OTHER; note = uridine-3'-phosphate
  modified_base 7: mod_base = OTHER; note = 2'-O-methylcytidine-3'-phosphate
  modified_base 8: mod_base = OTHER; note = adenosine-3'-phosphate
  modified_base 9: mod_base = OTHER; note = uridine-3'-phosphate
  modified_base 10: mod_base = OTHER; note = guanosine-3'-phosphate
  modified_base 11: mod_base = OTHER; note = uridine-3'-phosphate
  modified_base 12: mod_base = OTHER; note = uridine-3'-phosphate
  modified_base 13: mod_base = OTHER; note = 2'-O-methylcytidine-3'-phosphate
  modified_base 14: mod_base = OTHER; note = adenosine-3'-phosphate
  modified_base 15: mod_base = OTHER; note = guanosine-3'-phosphate
  modified_base 16: mod_base = OTHER; note = adenosine-3'-phosphate
  modified_base 17: mod_base = OTHER; note = guanosine-3'-phosphate
  modified_base 18: mod_base = OTHER; note = guanosine-3'-phosphate
  modified_base 19: mod_base = OTHER; note = uridine-3'-phosphate
  modified_base 20: mod_base = OTHER; note = 2'-deoxythymidine-3'-phosphorothioate
  misc_feature 1..19: note = RNA
  misc_feature 20..21: note = DNA
tcagttcatgttcagaggttt

SEQ ID NO: 663 - DNA, 21 bp, synthetic construct
  source 1..21: mol_type = other DNA
  modified_base 1: mod_base = OTHER; note = 2'-O-methylcytidine-3'-phosphate
  modified_base 2: mod_base = OTHER; note = 2'-O-methylcytidine-3'-phosphate
  modified_base 3: mod_base = OTHER; note = 2'-O-methyluridine-3'-phosphate
  modified_base 4: mod_base = OTHER; note = 2'-O-methylcytidine-3'-phosphate
  modified_base 5: mod_base = OTHER; note = 2'-O-methyluridine-3'-phosphate
  modified_base 6: mod_base = OTHER; note = guanosine-3'-phosphate
  modified_base 7: mod_base = OTHER; note = adenosine-3'-phosphate
  modified_base 8: mod_base = OTHER; note = adenosine-3'-phosphate
  modified_base 9: mod_base = OTHER; note = 2'-O-methylcytidine-3'-phosphate
  modified_base 10: mod_base = OTHER; note = adenosine-3'-phosphate
  modified_base 11: mod_base = OTHER; note = 2'-O-methyluridine-3'-phosphate
  modified_base 12: mod_base = OTHER; note = guanosine-3'-phosphate
  modified_base 13: mod_base = OTHER; note = adenosine-3'-phosphate
  modified_base 14: mod_base = OTHER; note = adenosine-3'-phosphate
  modified_base 15: mod_base = OTHER; note = 2'-O-methylcytidine-3'-phosphate
  modified_base 16: mod_base = OTHER; note = 2'-O-methyluridine-3'-phosphate
  modified_base 17: mod_base = OTHER; note = guanosine-3'-phosphate
  modified_base 18: mod_base = OTHER; note = adenosine-3'-phosphate
  modified_base 19: mod_base = OTHER; note = 2'-O-methylcytidine-3'-phosphate
  modified_base 20: mod_base = OTHER; note = 2'-deoxythymidine-3'-phosphorothioate
  misc_feature 1..19: note = RNA
  misc_feature 20..21: note = DNA
cctctgaacatgaactgactt

SEQ ID NO: 664 - DNA, 21 bp, synthetic construct
  source 1..21: mol_type = other DNA
  modified_base 1: mod_base = OTHER; note = guanosine-3'-phosphate
  modified_base 2: mod_base = OTHER; note = uridine-3'-phosphate
  modified_base 3: mod_base = OTHER; note = 2'-O-methylcytidine-3'-phosphate
  modified_base 4: mod_base = OTHER; note = adenosine-3'-phosphate
  modified_base 5: mod_base = OTHER; note = guanosine-3'-phosphate
  modified_base 6: mod_base = OTHER; note = uridine-3'-phosphate
  modified_base 7: mod_base = OTHER; note = uridine-3'-phosphate
  modified_base 8: mod_base = OTHER; note = 2'-O-methylcytidine-3'-phosphate
  modified_base 9: mod_base = OTHER; note = adenosine-3'-phosphate
  modified_base 10: mod_base = OTHER; note = uridine-3'-phosphate
  modified_base 11: mod_base = OTHER; note = guanosine-3'-phosphate
  modified_base 12: mod_base = OTHER; note = uridine-3'-phosphate
  modified_base 13: mod_base = OTHER; note = uridine-3'-phosphate
  modified_base 14: mod_base = OTHER; note = 2'-O-methylcytidine-3'-phosphate
  modified_base 15: mod_base = OTHER; note = adenosine-3'-phosphate
  modified_base 16: mod_base = OTHER; note = guanosine-3'-phosphate
  modified_base 17: mod_base = OTHER; note = adenosine-3'-phosphate
  modified_base 18: mod_base = OTHER; note = guanosine-3'-phosphate
  modified_base 19: mod_base = OTHER; note = guanosine-3'-phosphate
  modified_base 20: mod_base = OTHER; note = 2'-deoxythymidine-3'-phosphorothioate
  misc_feature 1..19: note = RNA
  misc_feature 20..21: note = DNA
gtcagttcatgttcagaggtt

SEQ ID NO: 665 - DNA, 21 bp, synthetic construct
  source 1..21: mol_type = other DNA
  modified_base 1: mod_base = OTHER; note = 2'-O-methyluridine-3'-phosphate
  modified_base 2: mod_base = OTHER; note = guanosine-3'-phosphate
  modified_base 3: mod_base = OTHER; note = adenosine-3'-phosphate
  modified_base 4: mod_base = OTHER; note = adenosine-3'-phosphate
  modified_base 5: mod_base = OTHER; note = 2'-O-methylcytidine-3'-phosphate
  modified_base 6: mod_base = OTHER; note = adenosine-3'-phosphate
  modified_base 7: mod_base = OTHER; note = 2'-O-methyluridine-3'-phosphate
  modified_base 8: mod_base = OTHER; note = guanosine-3'-phosphate
  modified_base 9: mod_base = OTHER; note = adenosine-3'-phosphate
  modified_base 10: mod_base = OTHER; note = adenosine-3'-phosphate
  modified_base 11: mod_base = OTHER; note = 2'-O-methylcytidine-3'-phosphate
  modified_base 12: mod_base = OTHER; note = 2'-O-methyluridine-3'-phosphate
  modified_base 13: mod_base = OTHER; note = guanosine-3'-phosphate
  modified_base 14: mod_base = OTHER; note = adenosine-3'-phosphate
  modified_base 15: mod_base = OTHER; note = 2'-O-methylcytidine-3'-phosphate
  modified_base 16: mod_base = OTHER; note = adenosine-3'-phosphate
  modified_base 17: mod_base = OTHER; note = 2'-O-methyluridine-3'-phosphate
  modified_base 18: mod_base = OTHER; note = guanosine-3'-phosphate
  modified_base 19: mod_base = OTHER; note = 2'-O-methyluridine-3'-phosphate
  modified_base 20: mod_base = OTHER; note = 2'-deoxythymidine-3'-phosphorothioate
  misc_feature 1..19: note = RNA
  misc_feature 20..21: note = DNA
tgaacatgaactgacatgttt

SEQ ID NO: 666 - DNA, 21 bp, synthetic construct
  source 1..21: mol_type = other DNA
  modified_base 1: mod_base = OTHER; note = adenosine-3'-phosphate
  modified_base 2: mod_base = OTHER; note = 2'-O-methylcytidine-3'-phosphate
  modified_base 3: mod_base = OTHER; note = adenosine-3'-phosphate
  modified_base 4: mod_base = OTHER; note = uridine-3'-phosphate
  modified_base 5: mod_base = OTHER; note = guanosine-3'-phosphate
  modified_base 6: mod_base = OTHER; note = uridine-3'-phosphate
  modified_base 7: mod_base = OTHER; note = 2'-O-methylcytidine-3'-phosphate
  modified_base 8: mod_base = OTHER; note = adenosine-3'-phosphate
  modified_base 9: mod_base = OTHER; note = guanosine-3'-phosphate
  modified_base 10: mod_base = OTHER; note = uridine-3'-phosphate
  modified_base 11: mod_base = OTHER; note = uridine-3'-phosphate
  modified_base 12: mod_base = OTHER; note = 2'-O-methylcytidine-3'-phosphate
  modified_base 13: mod_base = OTHER; note = adenosine-3'-phosphate
  modified_base 14: mod_base = OTHER; note = uridine-3'-phosphate
  modified_base 15: mod_base = OTHER; note = guanosine-3'-phosphate
  modified_base 16: mod_base = OTHER; note = uridine-3'-phosphate
  modified_base 17: mod_base = OTHER; note = uridine-3'-phosphate
  modified_base 18: mod_base = OTHER; note = 2'-O-methylcytidine-3'-phosphate
  modified_base 19: mod_base = OTHER; note = adenosine-3'-phosphate
  modified_base 20: mod_base = OTHER; note = 2'-deoxythymidine-3'-phosphorothioate
  misc_feature 1..19: note = RNA
  misc_feature 20..21: note = DNA
acatgtcagttcatgttcatt

SEQ ID NO: 667 - DNA, 21 bp, synthetic construct
  source 1..21: mol_type = other DNA
  modified_base 1: mod_base = OTHER; note = adenosine-3'-phosphate
  modified_base 2: mod_base = OTHER; note = 2'-O-methylcytidine-3'-phosphate
  modified_base 3: mod_base = OTHER; note = adenosine-3'-phosphate
  modified_base 4: mod_base = OTHER; note = 2'-O-methyluridine-3'-phosphate
  modified_base 5: mod_base = OTHER; note = guanosine-3'-phosphate
  modified_base 6: mod_base = OTHER; note = adenosine-3'-phosphate
  modified_base 7: mod_base = OTHER; note = adenosine-3'-phosphate
  modified_base 8: mod_base = OTHER; note = 2'-O-methylcytidine-3'-phosphate
  modified_base 9: mod_base = OTHER; note = 2'-O-methyluridine-3'-phosphate
  modified_base 10: mod_base = OTHER; note = guanosine-3'-phosphate
  modified_base 11: mod_base = OTHER; note = adenosine-3'-phosphate
  modified_base 12: mod_base = OTHER; note = 2'-O-methylcytidine-3'-phosphate
  modified_base 13: mod_base = OTHER; note = adenosine-3'-phosphate
  modified_base 14: mod_base = OTHER; note = 2'-O-methyluridine-3'-phosphate
  modified_base 15: mod_base = OTHER; note = guanosine-3'-phosphate
  modified_base 16: mod_base = OTHER; note = 2'-O-methyluridine-3'-phosphate
  modified_base 17: mod_base = OTHER; note = 2'-O-methylcytidine-3'-phosphate
  modified_base 18: mod_base = OTHER; note = adenosine-3'-phosphate
  modified_base 19: mod_base = OTHER; note = guanosine-3'-phosphate
  modified_base 20: mod_base = OTHER; note = 2'-deoxythymidine-3'-phosphorothioate
  misc_feature 1..19: note = RNA
  misc_feature 20..21: note = DNA
acatgaactgacatgtcagtt

SEQ ID NO: 668 - DNA, 21 bp, synthetic construct
  source 1..21: mol_type = other DNA
  modified_base 1: mod_base = OTHER; note = cytidine-3'-phosphate
  modified_base 2: mod_base = OTHER; note = uridine-3'-phosphate
  modified_base 3: mod_base = OTHER; note = guanosine-3'-phosphate
  modified_base 4: mod_base = OTHER; note = adenosine-3'-phosphate
  modified_base 5: mod_base = OTHER; note = 2'-O-methylcytidine-3'-phosphate
  modified_base 6: mod_base = OTHER; note = adenosine-3'-phosphate
  modified_base 7: mod_base = OTHER; note = uridine-3'-phosphate
  modified_base 8: mod_base = OTHER; note = guanosine-3'-phosphate
  modified_base 9: mod_base = OTHER; note = uridine-3'-phosphate
  modified_base 10: mod_base = OTHER; note = 2'-O-methylcytidine-3'-phosphate
  modified_base 11: mod_base = OTHER; note = adenosine-3'-phosphate
  modified_base 12: mod_base = OTHER; note = guanosine-3'-phosphate
  modified_base 13: mod_base = OTHER; note = uridine-3'-phosphate
  modified_base 14: mod_base = OTHER; note = uridine-3'-phosphate
  modified_base 15: mod_base = OTHER; note = 2'-O-methylcytidine-3'-phosphate
  modified_base 16: mod_base = OTHER; note = adenosine-3'-phosphate
  modified_base 17: mod_base = OTHER; note = uridine-3'-phosphate
  modified_base 18: mod_base = OTHER; note = guanosine-3'-phosphate
  modified_base 19: mod_base = OTHER; note = uridine-3'-phosphate
  modified_base 20: mod_base = OTHER; note = 2'-deoxythymidine-3'-phosphorothioate
  misc_feature 1..19: note = RNA
  misc_feature 20..21: note = DNA
ctgacatgtcagttcatgttt

SEQ ID NO: 669 - DNA, 21 bp, synthetic construct
  source 1..21: mol_type = other DNA
  modified_base 1: mod_base = OTHER; note = 2'-O-methylcytidine-3'-phosphate
  modified_base 2: mod_base = OTHER; note = adenosine-3'-phosphate
  modified_base 3: mod_base = OTHER; note = 2'-O-methyluridine-3'-phosphate
  modified_base 4: mod_base = OTHER; note = guanosine-3'-phosphate
  modified_base 5: mod_base = OTHER; note = adenosine-3'-phosphate
  modified_base 6: mod_base = OTHER; note = adenosine-3'-phosphate
  modified_base 7: mod_base = OTHER; note = 2'-O-methylcytidine-3'-phosphate
  modified_base 8: mod_base = OTHER; note = 2'-O-methyluridine-3'-phosphate
  modified_base 9: mod_base = OTHER; note = guanosine-3'-phosphate
  modified_base 10: mod_base = OTHER; note = adenosine-3'-phosphate
  modified_base 11: mod_base = OTHER; note = 2'-O-methylcytidine-3'-phosphate
  modified_base 12: mod_base = OTHER; note = adenosine-3'-phosphate
  modified_base 13: mod_base = OTHER; note = 2'-O-methyluridine-3'-phosphate
  modified_base 14: mod_base = OTHER; note = guanosine-3'-phosphate
  modified_base 15: mod_base = OTHER; note = 2'-O-methyluridine-3'-phosphate
  modified_base 16: mod_base = OTHER; note = 2'-O-methylcytidine-3'-phosphate
  modified_base 17: mod_base = OTHER; note = adenosine-3'-phosphate
  modified_base 18: mod_base = OTHER; note = guanosine-3'-phosphate
  modified_base 19: mod_base = OTHER; note = guanosine-3'-phosphate
  modified_base 20: mod_base = OTHER; note = 2'-deoxythymidine-3'-phosphorothioate
  misc_feature 1..19: note = RNA
  misc_feature 20..21: note = DNA
catgaactgacatgtcaggtt

SEQ ID NO: 670 - DNA, 21 bp, synthetic construct
  source 1..21: mol_type = other DNA
  modified_base 1: mod_base = OTHER; note = cytidine-3'-phosphate
  modified_base 2: mod_base = OTHER; note = cytidine-3'-phosphate
  modified_base 3: mod_base = OTHER; note = uridine-3'-phosphate
  modified_base 4: mod_base = OTHER; note = guanosine-3'-phosphate
  modified_base 5: mod_base = OTHER; note = adenosine-3'-phosphate
  modified_base 6: mod_base = OTHER; note = 2'-O-methylcytidine-3'-phosphate
  modified_base 7: mod_base = OTHER; note = adenosine-3'-phosphate
  modified_base 8: mod_base = OTHER; note = uridine-3'-phosphate
  modified_base 9: mod_base = OTHER; note = guanosine-3'-phosphate
  modified_base 10: mod_base = OTHER; note = uridine-3'-phosphate
  modified_base 11: mod_base = OTHER; note = 2'-O-methylcytidine-3'-phosphate
  modified_base 12: mod_base = OTHER; note = adenosine-3'-phosphate
  modified_base 13: mod_base = OTHER; note = guanosine-3'-phosphate
  modified_base 14: mod_base = OTHER; note = uridine-3'-phosphate
  modified_base 15: mod_base = OTHER; note = uridine-3'-phosphate
  modified_base 16: mod_base = OTHER; note = 2'-O-methylcytidine-3'-phosphate
  modified_base 17: mod_base = OTHER; note = adenosine-3'-phosphate
  modified_base 18: mod_base = OTHER; note = uridine-3'-phosphate
  modified_base 19: mod_base = OTHER; note = guanosine-3'-phosphate
  modified_base 20: mod_base = OTHER; note = 2'-deoxythymidine-3'-phosphorothioate
  misc_feature 1..19: note = RNA
  misc_feature 20..21: note = DNA
cctgacatgtcagttcatgtt

SEQ ID NO: 671 - DNA, 21 bp, synthetic construct
  source 1..21: mol_type = other DNA
  modified_base 1: mod_base = OTHER; note = 2'-O-methyluridine-3'-phosphate
  modified_base 2: mod_base = OTHER; note = guanosine-3'-phosphate
  modified_base 3: mod_base = OTHER; note = adenosine-3'-phosphate
  modified_base 4: mod_base = OTHER; note = adenosine-3'-phosphate
  modified_base 5: mod_base = OTHER; note = 2'-O-methylcytidine-3'-phosphate
  modified_base 6: mod_base = OTHER; note = 2'-O-methyluridine-3'-phosphate
  modified_base 7: mod_base = OTHER; note = guanosine-3'-phosphate
  modified_base 8: mod_base = OTHER; note = adenosine-3'-phosphate
  modified_base 9: mod_base = OTHER; note = 2'-O-methylcytidine-3'-phosphate
  modified_base 10: mod_base = OTHER; note = adenosine-3'-phosphate
  modified_base 11: mod_base = OTHER; note = 2'-O-methyluridine-3'-phosphate
  modified_base 12: mod_base = OTHER; note = guanosine-3'-phosphate
  modified_base 13: mod_base = OTHER; note = 2'-O-methyluridine-3'-phosphate
  modified_base 14: mod_base = OTHER; note = 2'-O-methylcytidine-3'-phosphate
  modified_base 15: mod_base = OTHER; note = adenosine-3'-phosphate
  modified_base 16: mod_base = OTHER; note = guanosine-3'-phosphate
  modified_base 17: mod_base = OTHER; note = guanosine-3'-phosphate
  modified_base 18: mod_base = OTHER; note = 2'-O-methylcytidine-3'-phosphate
  modified_base 19: mod_base = OTHER; note = 2'-O-methyluridine-3'-phosphate
  modified_base 20: mod_base = OTHER; note = 2'-deoxythymidine-3'-phosphorothioate
  misc_feature 1..19: note = RNA
  misc_feature 20..21: note = DNA
tgaactgacatgtcaggcttt

SEQ ID NO: 672 - DNA, 21 bp, synthetic construct
  source 1..21: mol_type = other DNA
  modified_base 1: mod_base = OTHER; note = adenosine-3'-phosphate
  modified_base 2: mod_base = OTHER; note = guanosine-3'-phosphate
  modified_base 3: mod_base = OTHER; note = cytidine-3'-phosphate
  modified_base 4: mod_base = OTHER; note = cytidine-3'-phosphate
  modified_base 5: mod_base = OTHER; note = uridine-3'-phosphate
  modified_base 6: mod_base = OTHER; note = guanosine-3'-phosphate
  modified_base 7: mod_base = OTHER; note = adenosine-3'-phosphate
  modified_base 8: mod_base = OTHER; note = 2'-O-methylcytidine-3'-phosphate
  modified_base 9: mod_base = OTHER; note = adenosine-3'-phosphate
  modified_base 10: mod_base = OTHER; note = uridine-3'-phosphate
  modified_base 11: mod_base = OTHER; note = guanosine-3'-phosphate
  modified_base 12: mod_base = OTHER; note = uridine-3'-phosphate
  modified_base 13: mod_base = OTHER; note = 2'-O-methylcytidine-3'-phosphate
  modified_base 14: mod_base = OTHER; note = adenosine-3'-phosphate
  modified_base 15: mod_base = OTHER; note = guanosine-3'-phosphate
  modified_base 16: mod_base = OTHER; note = uridine-3'-phosphate
  modified_base 17: mod_base = OTHER; note = uridine-3'-phosphate
  modified_base 18: mod_base = OTHER; note = 2'-O-methylcytidine-3'-phosphate
  modified_base 19: mod_base = OTHER; note = adenosine-3'-phosphate
  modified_base 20: mod_base = OTHER; note = 2'-deoxythymidine-3'-phosphorothioate
  misc_feature 1..19: note = RNA
  misc_feature 20..21: note = DNA
agcctgacatgtcagttcatt

SEQ ID NO: 673 - DNA, 21 bp, synthetic construct
  source 1..21: mol_type = other DNA
  modified_base 1: mod_base = OTHER; note = guanosine-3'-phosphate
  modified_base 2: mod_base = OTHER; note = adenosine-3'-phosphate
  modified_base 3: mod_base = OTHER; note = adenosine-3'-phosphate
  modified_base 4: mod_base = OTHER; note = 2'-O-methylcytidine-3'-phosphate
  modified_base 5: mod_base = OTHER; note = 2'-O-methyluridine-3'-phosphate
  modified_base 6: mod_base = OTHER; note = guanosine-3'-phosphate
  modified_base 7: mod_base = OTHER; note = adenosine-3'-phosphate
  modified_base 8: mod_base = OTHER; note = 2'-O-methylcytidine-3'-phosphate
  modified_base 9: mod_base = OTHER; note = adenosine-3'-phosphate
  modified_base 10: mod_base = OTHER; note = 2'-O-methyluridine-3'-phosphate
  modified_base 11: mod_base = OTHER; note = guanosine-3'-phosphate
  modified_base 12: mod_base = OTHER; note = 2'-O-methyluridine-3'-phosphate
  modified_base 13: mod_base = OTHER; note = 2'-O-methylcytidine-3'-phosphate
  modified_base 14: mod_base = OTHER; note = adenosine-3'-phosphate
  modified_base 15: mod_base = OTHER; note = guanosine-3'-phosphate
  modified_base 16: mod_base = OTHER; note = guanosine-3'-phosphate
  modified_base 17: mod_base = OTHER; note = 2'-O-methylcytidine-3'-phosphate
  modified_base 18: mod_base = OTHER; note = 2'-O-methyluridine-3'-phosphate
  modified_base 19: mod_base = OTHER; note = guanosine-3'-phosphate
  modified_base 20: mod_base = OTHER; note = 2'-deoxythymidine-3'-phosphorothioate
  misc_feature 1..19: note = RNA
  misc_feature 20..21: note = DNA
gaactgacatgtcaggctgtt

SEQ ID NO: 674 - DNA, 21 bp, synthetic construct
  source 1..21: mol_type = other DNA
  modified_base 1: mod_base = OTHER; note = 2'-O-methylcytidine-3'-phosphate
  modified_base 2: mod_base = OTHER; note = adenosine-3'-phosphate
  modified_base 3: mod_base = OTHER; note = guanosine-3'-phosphate
  modified_base 4: mod_base = OTHER; note = cytidine-3'-phosphate
  modified_base 5: mod_base = OTHER; note = cytidine-3'-phosphate
  modified_base 6: mod_base = OTHER; note = uridine-3'-phosphate
  modified_base 7: mod_base = OTHER; note = guanosine-3'-phosphate
  modified_base 8: mod_base = OTHER; note = adenosine-3'-phosphate
  modified_base 9: mod_base = OTHER; note = 2'-O-methylcytidine-3'-phosphate
  modified_base 10: mod_base = OTHER; note = adenosine-3'-phosphate
  modified_base 11: mod_base = OTHER; note = uridine-3'-phosphate
  modified_base 12: mod_base = OTHER; note = guanosine-3'-phosphate
  modified_base 13: mod_base = OTHER; note = uridine-3'-phosphate
  modified_base 14: mod_base = OTHER; note = 2'-O-methylcytidine-3'-phosphate
  modified_base 15: mod_base = OTHER; note = adenosine-3'-phosphate
  modified_base 16: mod_base = OTHER; note = guanosine-3'-phosphate
  modified_base 17: mod_base = OTHER; note = uridine-3'-phosphate
  modified_base 18: mod_base = OTHER; note = uridine-3'-phosphate
  modified_base 19: mod_base = OTHER; note = cytidine-3'-phosphate
  modified_base 20: mod_base = OTHER; note = 2'-deoxythymidine-3'-phosphorothioate
  misc_feature 1..19: note = RNA
  misc_feature 20..21: note = DNA
cagcctgacatgtcagttctt

SEQ ID NO: 675 - DNA, 21 bp, synthetic construct
  source 1..21: mol_type = other DNA
  modified_base 1: mod_base = OTHER; note = guanosine-3'-phosphate
  modified_base 2: mod_base = OTHER; note = adenosine-3'-phosphate
  modified_base 3: mod_base = OTHER; note = 2'-O-methylcytidine-3'-phosphate
  modified_base 4: mod_base = OTHER; note = adenosine-3'-phosphate
  modified_base 5: mod_base = OTHER; note = 2'-O-methyluridine-3'-phosphate
  modified_base 6: mod_base = OTHER; note = guanosine-3'-phosphate
  modified_base 7: mod_base = OTHER; note = 2'-O-methyluridine-3'-phosphate
  modified_base 8: mod_base = OTHER; note = 2'-O-methylcytidine-3'-phosphate
  modified_base 9: mod_base = OTHER; note = adenosine-3'-phosphate
  modified_base 10: mod_base = OTHER; note = guanosine-3'-phosphate
  modified_base 11: mod_base = OTHER; note = guanosine-3'-phosphate
  modified_base 12: mod_base = OTHER; note = 2'-O-methylcytidine-3'-phosphate
  modified_base 13: mod_base = OTHER; note = 2'-O-methyluridine-3'-phosphate
  modified_base 14: mod_base = OTHER; note = guanosine-3'-phosphate
  modified_base 15: mod_base = OTHER; note = adenosine-3'-phosphate
  modified_base 16: mod_base = OTHER; note = guanosine-3'-phosphate
  modified_base 17: mod_base = OTHER; note = guanosine-3'-phosphate
  modified_base 18: mod_base = OTHER; note = guanosine-3'-phosphate
  modified_base 19: mod_base = OTHER; note = 2'-O-methylcytidine-3'-phosphate
  modified_base 20: mod_base = OTHER; note = 2'-deoxythymidine-3'-phosphorothioate
  misc_feature 1..19: note = RNA
  misc_feature 20..21: note = DNA
gacatgtcaggctgagggctt

SEQ ID NO: 676 - DNA, 21 bp, synthetic construct
  source 1..21: mol_type = other DNA
  modified_base 1: mod_base = OTHER; note = guanosine-3'-phosphate
  modified_base 2: mod_base = OTHER; note = cytidine-3'-phosphate
  modified_base 3: mod_base = OTHER; note = cytidine-3'-phosphate
  modified_base 4: mod_base = OTHER; note = cytidine-3'-phosphate
  modified_base 5: mod_base = OTHER; note = uridine-3'-phosphate
  modified_base 6: mod_base = OTHER; note = 2'-O-methylcytidine-3'-phosphate
  modified_base 7: mod_base = OTHER; note = adenosine-3'-phosphate
  modified_base 8: mod_base = OTHER; note = guanosine-3'-phosphate
  modified_base 9: mod_base = OTHER; note = cytidine-3'-phosphate
  modified_base 10: mod_base = OTHER; note = cytidine-3'-phosphate
  modified_base 11: mod_base = OTHER; note = uridine-3'-phosphate
  modified_base 12: mod_base = OTHER; note = guanosine-3'-phosphate
  modified_base 13: mod_base = OTHER; note = adenosine-3'-phosphate
  modified_base 14: mod_base = OTHER; note = 2'-O-methylcytidine-3'-phosphate
  modified_base 15: mod_base = OTHER; note = adenosine-3'-phosphate
  modified_base 16: mod_base = OTHER; note = uridine-3'-phosphate
  modified_base 17: mod_base = OTHER; note = guanosine-3'-phosphate
  modified_base 18: mod_base = OTHER; note = uridine-3'-phosphate
  modified_base 19: mod_base = OTHER; note = cytidine-3'-phosphate
  modified_base 20: mod_base = OTHER; note = 2'-deoxythymidine-3'-phosphorothioate
  misc_feature 1..19: note = RNA
  misc_feature 20..21: note = DNA
gccctcagcctgacatgtctt

SEQ ID NO: 677 - DNA, 21 bp, synthetic construct
  source 1..21: mol_type = other DNA
  modified_base 1: mod_base = OTHER; note = 2'-O-methyluridine-3'-phosphate
  modified_base 2: mod_base = OTHER; note = guanosine-3'-phosphate
  modified_base 3: mod_base = OTHER; note = 2'-O-methyluridine-3'-phosphate
  modified_base 4: mod_base = OTHER; note = 2'-O-methylcytidine-3'-phosphate
  modified_base 5: mod_base = OTHER; note = adenosine-3'-phosphate
  modified_base 6: mod_base = OTHER; note = guanosine-3'-phosphate
  modified_base 7: mod_base = OTHER; note = guanosine-3'-phosphate
  modified_base 8: mod_base = OTHER; note = 2'-O-methylcytidine-3'-phosphate
  modified_base 9: mod_base = OTHER; note = 2'-O-methyluridine-3'-phosphate
  modified_base 10: mod_base = OTHER; note = guanosine-3'-phosphate
  modified_base 11: mod_base = OTHER; note = adenosine-3'-phosphate
  modified_base 12: mod_base = OTHER; note = guanosine-3'-phosphate
  modified_base 13: mod_base = OTHER; note = guanosine-3'-phosphate
  modified_base 14: mod_base = OTHER; note = guanosine-3'-phosphate
  modified_base 15: mod_base = OTHER; note = 2'-O-methylcytidine-3'-phosphate
  modified_base 16: mod_base = OTHER; note = 2'-O-methyluridine-3'-phosphate
  modified_base 17: mod_base = OTHER; note = adenosine-3'-phosphate
  modified_base 18: mod_base = OTHER; note = 2'-O-methylcytidine-3'-phosphate
  modified_base 19: mod_base = OTHER; note = 2'-O-methylcytidine-3'-phosphate
  modified_base 20: mod_base = OTHER; note = 2'-deoxythymidine-3'-phosphorothioate
  misc_feature 1..19: note = RNA
  misc_feature 20..21: note = DNA
tgtcaggctgagggctacctt

SEQ ID NO: 678 - DNA, 21 bp, synthetic construct
  source 1..21: mol_type = other DNA
  modified_base 1: mod_base = OTHER; note = guanosine-3'-phosphate
  modified_base 2: mod_base = OTHER; note = guanosine-3'-phosphate
  modified_base 3: mod_base = OTHER; note = 2'-O-methyluridine-3'-phosphate
  modified_base 4: mod_base = OTHER; note = adenosine-3'-phosphate
  modified_base 5: mod_base = OTHER; note = guanosine-3'-phosphate
  modified_base 6: mod_base = OTHER; note = cytidine-3'-phosphate
  modified_base 7: mod_base = OTHER; note = cytidine-3'-phosphate
  modified_base 8: mod_base = OTHER; note = cytidine-3'-phosphate
  modified_base 9: mod_base = OTHER; note = uridine-3'-phosphate
  modified_base 10: mod_base = OTHER; note = 2'-O-methylcytidine-3'-phosphate
  modified_base 11: mod_base = OTHER; note = adenosine-3'-phosphate
  modified_base 12: mod_base = OTHER; note = guanosine-3'-phosphate
  modified_base 13: mod_base = OTHER; note = cytidine-3'-phosphate
  modified_base 14: mod_base = OTHER; note = cytidine-3'-phosphate
  modified_base 15: mod_base = OTHER; note = uridine-3'-phosphate
  modified_base 16: mod_base = OTHER; note = guanosine-3'-phosphate
  modified_base 17: mod_base = OTHER; note = adenosine-3'-phosphate
  modified_base 18: mod_base = OTHER; note = 2'-O-methylcytidine-3'-phosphate
  modified_base 19: mod_base = OTHER; note = adenosine-3'-phosphate
  modified_base 20: mod_base = OTHER; note = 2'-deoxythymidine-3'-phosphorothioate
  misc_feature 1..19: note = RNA
  misc_feature 20..21: note = DNA
ggtagccctcagcctgacatt

SEQ ID NO: 679 - DNA, 21 bp, synthetic construct
  source 1..21: mol_type = other DNA
  modified_base 1: mod_base = OTHER; note = 2'-O-methyluridine-3'-phosphate
  modified_base 2: mod_base = OTHER; note = adenosine-3'-phosphate
  modified_base 3: mod_base = OTHER; note = 2'-O-methylcytidine-3'-phosphate
  modified_base 4: mod_base = OTHER; note = 2'-O-methylcytidine-3'-phosphate
  modified_base 5: mod_base = OTHER; note = 2'-O-methylcytidine-3'-phosphate
  modified_base 6: mod_base = OTHER; note = 2'-O-methylcytidine-3'-phosphate
  modified_base 7: mod_base = OTHER; note = adenosine-3'-phosphate
  modified_base 8: mod_base = OTHER; note = adenosine-3'-phosphate
  modified_base 9: mod_base = OTHER; note = guanosine-3'-phosphate
  modified_base 10: mod_base = OTHER; note = guanosine-3'-phosphate
  modified_base 11: mod_base = OTHER; note = 2'-O-methylcytidine-3'-phosphate
  modified_base 12: mod_base = OTHER; note = 2'-O-methylcytidine-3'-phosphate
  modified_base 13: mod_base = OTHER; note = guanosine-3'-phosphate
  modified_base 14: mod_base = OTHER; note = adenosine-3'-phosphate
  modified_base 15: mod_base = OTHER; note = adenosine-3'-phosphate
  modified_base 16: mod_base = OTHER; note = guanosine-3'-phosphate
  modified_base 17: mod_base = OTHER; note = 2'-O-methyluridine-3'-phosphate
  modified_base 18: mod_base = OTHER; note = 2'-O-methylcytidine-3'-phosphate
  modified_base 19: mod_base = OTHER; note = adenosine-3'-phosphate
  modified_base 20: mod_base = OTHER; note = 2'-deoxythymidine-3'-phosphorothioate
  misc_feature 1..19: note = RNA
  misc_feature 20..21: note = DNA
taccccaaggccgaagtcatt

SEQ ID NO: 680 - DNA, 21 bp, synthetic construct
  source 1..21: mol_type = other DNA
  modified_base 1: mod_base = OTHER; note = uridine-3'-phosphate
  modified_base 2: mod_base = OTHER; note = guanosine-3'-phosphate
  modified_base 3: mod_base = OTHER; note = adenosine-3'-phosphate
  modified_base 4: mod_base = OTHER; note = cytidine-3'-phosphate
  modified_base 5: mod_base = OTHER; note = uridine-3'-phosphate
  modified_base 6: mod_base = OTHER; note = uridine-3'-phosphate
  modified_base 7: mod_base = OTHER; note = cytidine-3'-phosphate
  modified_base 8: mod_base = OTHER; note = guanosine-3'-phosphate
  modified_base 9: mod_base = OTHER; note = guanosine-3'-phosphate
  modified_base 10: mod_base = OTHER; note = cytidine-3'-phosphate
  modified_base 11: mod_base = OTHER; note = cytidine-3'-phosphate
  modified_base 12: mod_base = OTHER; note = uridine-3'-phosphate
  modified_base 13: mod_base = OTHER; note = uridine-3'-phosphate
  modified_base 14: mod_base = OTHER; note = guanosine-3'-phosphate
  modified_base 15: mod_base = OTHER; note = guanosine-3'-phosphate
  modified_base 16: mod_base = OTHER; note = guanosine-3'-phosphate
  modified_base 17: mod_base = OTHER; note = guanosine-3'-phosphate
  modified_base 18: mod_base = OTHER; note = 2'-O-methyluridine-3'-phosphate
  modified_base 19: mod_base = OTHER; note = adenosine-3'-phosphate
  modified_base 20: mod_base = OTHER; note = 2'-deoxythymidine-3'-phosphorothioate
  misc_feature 1..19: note = RNA
  misc_feature 20..21: note = DNA
tgacttcggccttggggtatt

SEQ ID NO: 681 - DNA, 21 bp, synthetic construct
  source 1..21: mol_type = other DNA
  modified_base 1: mod_base = OTHER; note = adenosine-3'-phosphate
  modified_base 2: mod_base = OTHER; note = adenosine-3'-phosphate
  modified_base 3: mod_base = OTHER; note = guanosine-3'-phosphate
  modified_base 4: mod_base = OTHER; note = guanosine-3'-phosphate
  modified_base 5: mod_base = OTHER; note = 2'-O-methylcytidine-3'-phosphate
  modified_base 6: mod_base = OTHER; note = 2'-O-methylcytidine-3'-phosphate
  modified_base 7: mod_base = OTHER; note = guanosine-3'-phosphate
  modified_base 8: mod_base = OTHER; note = adenosine-3'-phosphate
  modified_base 9: mod_base = OTHER; note = adenosine-3'-phosphate
  modified_base 10: mod_base = OTHER; note = guanosine-3'-phosphate
  modified_base 11: mod_base = OTHER; note = 2'-O-methyluridine-3'-phosphate
  modified_base 12: mod_base = OTHER; note = 2'-O-methylcytidine-3'-phosphate
  modified_base 13: mod_base = OTHER; note = adenosine-3'-phosphate
  modified_base 14: mod_base = OTHER; note = 2'-O-methyluridine-3'-phosphate
  modified_base 15: mod_base = OTHER; note = 2'-O-methylcytidine-3'-phosphate
  modified_base 16: mod_base = OTHER; note = 2'-O-methyluridine-3'-phosphate
  modified_base 17: mod_base = OTHER; note = guanosine-3'-phosphate
  modified_base 18: mod_base = OTHER; note = guanosine-3'-phosphate
  modified_base 19: mod_base = OTHER; note = adenosine-3'-phosphate
  modified_base 20: mod_base = OTHER; note = 2'-deoxythymidine-3'-phosphorothioate
  misc_feature 1..19: note = RNA
  misc_feature 20..21: note = DNA
aaggccgaagtcatctggatt

SEQ ID NO: 682 - DNA, 21 bp, synthetic construct
  source 1..21: mol_type = other DNA
  modified_base 1: mod_base = OTHER; note = uridine-3'-phosphate
  modified_base 2: mod_base = OTHER; note = cytidine-3'-phosphate
  modified_base 3: mod_base = OTHER; note = 2'-O-methylcytidine-3'-phosphate
  modified_base 4: mod_base = OTHER; note = adenosine-3'-phosphate
  modified_base 5: mod_base = OTHER; note = guanosine-3'-phosphate
  modified_base 6: mod_base = OTHER; note = adenosine-3'-phosphate
  modified_base 7: mod_base = OTHER; note = uridine-3'-phosphate
  modified_base 8: mod_base = OTHER; note = guanosine-3'-phosphate
  modified_base 9: mod_base = OTHER; note = adenosine-3'-phosphate
  modified_base 10: mod_base = OTHER; note = cytidine-3'-phosphate
  modified_base 11: mod_base = OTHER; note = uridine-3'-phosphate
  modified_base 12: mod_base = OTHER; note = uridine-3'-phosphate
  modified_base 13: mod_base = OTHER; note = cytidine-3'-phosphate
  modified_base 14: mod_base = OTHER; note = guanosine-3'-phosphate
  modified_base 15: mod_base = OTHER; note = guanosine-3'-phosphate
  modified_base 16: mod_base = OTHER; note = cytidine-3'-phosphate
  modified_base 17: mod_base = OTHER; note = cytidine-3'-phosphate
  modified_base 18: mod_base = OTHER; note = uridine-3'-phosphate
  modified_base 19: mod_base = OTHER; note = uridine-3'-phosphate
  modified_base 20: mod_base = OTHER; note = 2'-deoxythymidine-3'-phosphorothioate
  misc_feature 1..19: note = RNA
  misc_feature 20..21: note = DNA
tccagatgacttcggcctttt

SEQ ID NO: 683 - DNA, 21 bp, synthetic construct
  source 1..21: mol_type = other DNA
  modified_base 1: mod_base = OTHER; note = 2'-O-methylcytidine-3'-phosphate
  modified_base 2: mod_base = OTHER; note = guanosine-3'-phosphate
  modified_base 3: mod_base = OTHER; note = adenosine-3'-phosphate
  modified_base 4: mod_base = OTHER; note = adenosine-3'-phosphate
  modified_base 5: mod_base = OTHER; note = guanosine-3'-phosphate
  modified_base 6: mod_base = OTHER; note = 2'-O-methyluridine-3'-phosphate
  modified_base 7: mod_base = OTHER; note = 2'-O-methylcytidine-3'-phosphate
  modified_base 8: mod_base = OTHER; note = adenosine-3'-phosphate
  modified_base 9: mod_base = OTHER; note = 2'-O-methyluridine-3'-phosphate
  modified_base 10: mod_base = OTHER; note = 2'-O-methylcytidine-3'-phosphate
  modified_base 11: mod_base = OTHER; note = 2'-O-methyluridine-3'-phosphate
  modified_base 12: mod_base = OTHER; note = guanosine-3'-phosphate
  modified_base 13: mod_base = OTHER; note = guanosine-3'-phosphate
  modified_base 14: mod_base = OTHER; note = adenosine-3'-phosphate
  modified_base 15: mod_base = OTHER; note = 2'-O-methylcytidine-3'-phosphate
  modified_base 16: mod_base = OTHER; note = adenosine-3'-phosphate
  modified_base 17: mod_base = OTHER; note = adenosine-3'-phosphate
  modified_base 18: mod_base = OTHER; note = guanosine-3'-phosphate
  modified_base 19: mod_base = OTHER; note = 2'-O-methylcytidine-3'-phosphate
  modified_base 20: mod_base = OTHER; note = 2'-deoxythymidine-3'-phosphorothioate
  misc_feature 1..19: note = RNA
  misc_feature 20..21: note = DNA
cgaagtcatctggacaagctt

SEQ ID NO: 684 - DNA, 21 bp, synthetic construct
  source 1..21: mol_type = other DNA
  modified_base 1: mod_base = OTHER; note = guanosine-3'-phosphate
  modified_base 2: mod_base = OTHER; note = cytidine-3'-phosphate
  modified_base 3: mod_base = OTHER; note = uridine-3'-phosphate
  modified_base 4: mod_base = OTHER; note = uridine-3'-phosphate
  modified_base 5: mod_base = OTHER; note = guanosine-3'-phosphate
  modified_base 6: mod_base = OTHER; note = uridine-3'-phosphate
  modified_base 7: mod_base = OTHER; note = cytidine-3'-phosphate
  modified_base 8: mod_base = OTHER; note = 2'-O-methylcytidine-3'-phosphate
  modified_base 9: mod_base = OTHER; note = adenosine-3'-phosphate
  modified_base 10: mod_base = OTHER; note = guanosine-3'-phosphate
  modified_base 11: mod_base = OTHER; note = adenosine-3'-phosphate
  modified_base 12: mod_base = OTHER; note = uridine-3'-phosphate
  modified_base 13: mod_base = OTHER; note = guanosine-3'-phosphate
  modified_base 14: mod_base = OTHER; note = adenosine-3'-phosphate
  modified_base 15: mod_base = OTHER; note = cytidine-3'-phosphate
  modified_base 16: mod_base = OTHER; note = uridine-3'-phosphate
  modified_base 17: mod_base = OTHER; note = uridine-3'-phosphate
  modified_base 18: mod_base = OTHER; note = cytidine-3'-phosphate
  modified_base 19: mod_base = OTHER; note = guanosine-3'-phosphate
  modified_base 20: mod_base = OTHER; note = 2'-deoxythymidine-3'-phosphorothioate
  misc_feature 1..19: note = RNA
  misc_feature 20..21: note = DNA
gcttgtccagatgacttcgtt

SEQ ID NO: 685 - DNA, 21 bp, synthetic construct
  source 1..21: mol_type = other DNA
  modified_base 1: mod_base = OTHER; note = 2'-O-methylcytidine-3'-phosphate
  modified_base 2: mod_base = OTHER; note = adenosine-3'-phosphate
  modified_base 3: mod_base = OTHER; note = 2'-O-methyluridine-3'-phosphate
  modified_base 4: mod_base = OTHER; note = 2'-O-methylcytidine-3'-phosphate
  modified_base 5: mod_base = OTHER; note = 2'-O-methyluridine-3'-phosphate
  modified_base 6: mod_base = OTHER; note = guanosine-3'-phosphate
  modified_base 7: mod_base = OTHER; note = guanosine-3'-phosphate
  modified_base 8: mod_base = OTHER; note = adenosine-3'-phosphate
  modified_base 9: mod_base = OTHER; note = 2'-O-methylcytidine-3'-phosphate
  modified_base 10: mod_base = OTHER; note = adenosine-3'-phosphate
  modified_base 11: mod_base = OTHER; note = adenosine-3'-phosphate
  modified_base 12: mod_base = OTHER; note = guanosine-3'-phosphate
  modified_base 13: mod_base = OTHER; note = 2'-O-methylcytidine-3'-phosphate
  modified_base 14: mod_base = OTHER; note = adenosine-3'-phosphate
  modified_base 15: mod_base = OTHER; note = guanosine-3'-phosphate
  modified_base 16: mod_base = OTHER; note = 2'-O-methyluridine-3'-phosphate
  modified_base 17: mod_base = OTHER; note = guanosine-3'-phosphate
  modified_base 18: mod_base = OTHER; note = adenosine-3'-phosphate
  modified_base 19: mod_base = OTHER; note = 2'-O-methylcytidine-3'-phosphate
  modified_base 20: mod_base = OTHER; note = 2'-deoxythymidine-3'-phosphorothioate
  misc_feature 1..19: note = RNA
  misc_feature 20..21: note = DNA
catctggacaagcagtgactt

SEQ ID NO: 686 - DNA, 21 bp, synthetic construct
  source 1..21: mol_type = other DNA
  modified_base 1: mod_base = OTHER; note = guanosine-3'-phosphate
  modified_base 2: mod_base = OTHER; note = uridine-3'-phosphate
  modified_base 3: mod_base = OTHER; note = 2'-O-methylcytidine-3'-phosphate
  modified_base 4: mod_base = OTHER; note = adenosine-3'-phosphate
  modified_base 5: mod_base = OTHER; note = cytidine-3'-phosphate
  modified_base 6: mod_base = OTHER; note = uridine-3'-phosphate
  modified_base 7: mod_base = OTHER; note = guanosine-3'-phosphate
  modified_base 8: mod_base = OTHER; note = cytidine-3'-phosphate
  modified_base 9: mod_base = OTHER; note = uridine-3'-phosphate
  modified_base 10: mod_base = OTHER; note = uridine-3'-phosphate
  modified_base 11: mod_base = OTHER; note = guanosine-3'-phosphate
  modified_base 12: mod_base = OTHER; note = uridine-3'-phosphate
  modified_base 13: mod_base = OTHER; note = cytidine-3'-phosphate
  modified_base 14: mod_base = OTHER; note = 2'-O-methylcytidine-3'-phosphate
  modified_base 15: mod_base = OTHER; note = adenosine-3'-phosphate
  modified_base 16: mod_base = OTHER; note = guanosine-3'-phosphate
  modified_base 17: mod_base = OTHER; note = adenosine-3'-phosphate
  modified_base 18: mod_base = OTHER; note = uridine-3'-phosphate
  modified_base 19: mod_base = OTHER; note = guanosine-3'-phosphate
  modified_base 20: mod_base = OTHER; note = 2'-deoxythymidine-3'-phosphorothioate
  misc_feature 1..19: note = RNA
  misc_feature 20..21: note = DNA
gtcactgcttgtccagatgtt

SEQ ID NO: 687 - DNA, 21 bp, synthetic construct
  source 1..21: mol_type = other DNA
  modified_base 1: mod_base = OTHER; note = adenosine-3'-phosphate
  modified_base 2: mod_base = OTHER; note = guanosine-3'-phosphate
  modified_base 3: mod_base = OTHER; note = 2'-O-methylcytidine-3'-phosphate
  modified_base 4: mod_base = OTHER; note = adenosine-3'-phosphate
  modified_base 5: mod_base = OTHER; note = guanosine-3'-phosphate
  modified_base 6: mod_base = OTHER; note = 2'-O-methyluridine-3'-phosphate
  modified_base 7: mod_base = OTHER; note = guanosine-3'-phosphate
  modified_base 8: mod_base = OTHER; note = adenosine-3'-phosphate
  modified_base 9: mod_base = OTHER; note = 2'-O-methylcytidine-3'-phosphate
  modified_base 10: mod_base = OTHER; note = 2'-O-methylcytidine-3'-phosphate
  modified_base 11: mod_base = OTHER; note = adenosine-3'-phosphate
  modified_base 12: mod_base = OTHER; note = 2'-O-methyluridine-3'-phosphate
  modified_base 13: mod_base = OTHER; note = 2'-O-methylcytidine-3'-phosphate
  modified_base 14: mod_base = OTHER; note = adenosine-3'-phosphate
  modified_base 15: mod_base = OTHER; note = adenosine-3'-phosphate
  modified_base 16: mod_base = OTHER; note = guanosine-3'-phosphate
  modified_base 17: mod_base = OTHER; note = 2'-O-methyluridine-3'-phosphate
  modified_base 18: mod_base = OTHER; note = 2'-O-methylcytidine-3'-phosphate
  modified_base 19: mod_base = OTHER; note = 2'-O-methylcytidine-3'-phosphate
  modified_base 20: mod_base = OTHER; note = 2'-deoxythymidine-3'-phosphorothioate
  misc_feature 1..19: note = RNA
  misc_feature 20..21: note = DNA
agcagtgaccatcaagtcctt

SEQ ID NO: 688 - DNA, 21 bp, synthetic construct
  source 1..21: mol_type = other DNA
  modified_base 1: mod_base = OTHER; note = guanosine-3'-phosphate
  modified_base 2: mod_base = OTHER; note = guanosine-3'-phosphate
  modified_base 3: mod_base = OTHER; note = adenosine-3'-phosphate
  modified_base 4: mod_base = OTHER; note = cytidine-3'-phosphate
  modified_base 5: mod_base = OTHER; note = uridine-3'-phosphate
  modified_base 6: mod_base = OTHER; note = uridine-3'-phosphate
  modified_base 7: mod_base = OTHER; note = guanosine-3'-phosphate
  modified_base 8: mod_base = OTHER; note = adenosine-3'-phosphate
  modified_base 9: mod_base = OTHER; note = uridine-3'-phosphate
  modified_base 10: mod_base = OTHER; note = guanosine-3'-phosphate
  modified_base 11: mod_base = OTHER; note = guanosine-3'-phosphate
  modified_base 12: mod_base = OTHER; note = uridine-3'-phosphate
  modified_base 13: mod_base = OTHER; note = 2'-O-methylcytidine-3'-phosphate
  modified_base 14: mod_base = OTHER; note = adenosine-3'-phosphate
  modified_base 15: mod_base = OTHER; note = cytidine-3'-phosphate
  modified_base 16: mod_base = OTHER; note = uridine-3'-phosphate
  modified_base 17: mod_base = OTHER; note = guanosine-3'-phosphate
  modified_base 18: mod_base = OTHER; note = cytidine-3'-phosphate
  modified_base 19: mod_base = OTHER; note = uridine-3'-phosphate
  modified_base 20: mod_base = OTHER; note = 2'-deoxythymidine-3'-phosphorothioate
  misc_feature 1..19: note = RNA
  misc_feature 20..21: note = DNA
ggacttgatggtcactgcttt

SEQ ID NO: 689 - DNA, 21 bp, synthetic construct
  source 1..21: mol_type = other DNA
  modified_base 1: mod_base = OTHER; note = 2'-O-methyluridine-3'-phosphate
  modified_base 2: mod_base = OTHER; note = 2'-O-methylcytidine-3'-phosphate
  modified_base 3: mod_base = OTHER; note = adenosine-3'-phosphate
  modified_base 4: mod_base = OTHER; note = adenosine-3'-phosphate
  modified_base 5: mod_base = OTHER; note = guanosine-3'-phosphate
  modified_base 6: mod_base = OTHER; note = 2'-O-methyluridine-3'-phosphate
  modified_base 7: mod_base = OTHER; note = 2'-O-methylcytidine-3'-phosphate
  modified_base 8: mod_base = OTHER; note = 2'-O-methylcytidine-3'-phosphate
  modified_base 9: mod_base = OTHER; note = 2'-O-methyluridine-3'-phosphate
  modified_base 10: mod_base = OTHER; note = guanosine-3'-phosphate
  modified_base 11: mod_base = OTHER; note = adenosine-3'-phosphate
  modified_base 12: mod_base = OTHER; note = guanosine-3'-phosphate
  modified_base 13: mod_base = OTHER; note = 2'-O-methyluridine-3'-phosphate
  modified_base 14: mod_base = OTHER; note = guanosine-3'-phosphate
  modified_base 15: mod_base = OTHER; note = guanosine-3'-phosphate
  modified_base 16: mod_base = OTHER; note = 2'-O-methyluridine-3'-phosphate
  modified_base 17: mod_base = OTHER; note = adenosine-3'-phosphate
  modified_base 18: mod_base = OTHER; note = adenosine-3'-phosphate
  modified_base 19: mod_base = OTHER; note = guanosine-3'-phosphate
  modified_base 20: mod_base = OTHER; note = 2'-deoxythymidine-3'-phosphorothioate
  misc_feature 1..19: note = RNA
  misc_feature 20..21: note = DNA
tcaagtcctgagtggtaagtt

SEQ ID NO: 690 - DNA, 21 bp, synthetic construct
  source 1..21: mol_type = other DNA
  modified_base 1: mod_base = OTHER; note = cytidine-3'-phosphate
  modified_base 2: mod_base = OTHER; note = uridine-3'-phosphate
  modified_base 3: mod_base = OTHER; note = 2'-O-methyluridine-3'-phosphate
  modified_base 4: mod_base = OTHER; note = adenosine-3'-phosphate
  modified_base 5: mod_base = OTHER; note = cytidine-3'-phosphate
  modified_base 6: mod_base = OTHER; note = 2'-O-methylcytidine-3'-phosphate
  modified_base 7: mod_base = OTHER; note = adenosine-3'-phosphate
  modified_base 8: mod_base = OTHER; note = cytidine-3'-phosphate
  modified_base 9: mod_base = OTHER; note = uridine-3'-phosphate
  modified_base 10: mod_base = OTHER; note = 2'-O-methylcytidine-3'-phosphate
  modified_base 11: mod_base = OTHER; note = adenosine-3'-phosphate
  modified_base 12: mod_base = OTHER; note = guanosine-3'-phosphate
  modified_base 13: mod_base = OTHER; note = guanosine-3'-phosphate
  modified_base 14: mod_base = OTHER; note = adenosine-3'-phosphate
  modified_base 15: mod_base = OTHER; note = cytidine-3'-phosphate
  modified_base 16: mod_base = OTHER; note = uridine-3'-phosphate
  modified_base 17: mod_base = OTHER; note = uridine-3'-phosphate
  modified_base 18: mod_base = OTHER; note = guanosine-3'-phosphate
  modified_base 19: mod_base = OTHER; note = adenosine-3'-phosphate
  modified_base 20: mod_base = OTHER; note = 2'-deoxythymidine-3'-phosphorothioate
  misc_feature 1..19: note = RNA
  misc_feature 20..21: note = DNA
cttaccactcaggacttgatt

SEQ ID NO: 691 - DNA, 21 bp, synthetic construct
  source 1..21: mol_type = other DNA
  modified_base 1: mod_base = OTHER; note = guanosine-3'-phosphate
  modified_base 2: mod_base = OTHER; note = adenosine-3'-phosphate
  modified_base 3: mod_base = OTHER; note = adenosine-3'-phosphate
  modified_base 4: mod_base = OTHER; note = 2'-O-methyluridine-3'-phosphate
  modified_base 5: mod_base = OTHER; note = 2'-O-methylcytidine-3'-phosphate
  modified_base 6: mod_base = OTHER; note = adenosine-3'-phosphate
  modified_base 7: mod_base = OTHER; note = adenosine-3'-phosphate
  modified_base 8: mod_base = OTHER; note = 2'-O-methylcytidine-3'-phosphate
  modified_base 9: mod_base = OTHER; note = adenosine-3'-phosphate
  modified_base 10: mod_base = OTHER; note = 2'-O-methylcytidine-3'-phosphate
  modified_base 11: mod_base = OTHER; note = adenosine-3'-phosphate
  modified_base 12: mod_base = OTHER; note = adenosine-3'-phosphate
  modified_base 13: mod_base = OTHER; note = 2'-O-methylcytidine-3'-phosphate
  modified_base 14: mod_base = OTHER; note = adenosine-3'-phosphate
  modified_base 15: mod_base = OTHER; note = adenosine-3'-phosphate
  modified_base 16: mod_base = OTHER; note = 2'-O-methylcytidine-3'-phosphate
  modified_base 17: mod_base = OTHER; note = 2'-O-methyluridine-3'-phosphate
  modified_base 18: mod_base = OTHER; note = adenosine-3'-phosphate
  modified_base 19: mod_base = OTHER; note = adenosine-3'-phosphate
  modified_base 20: mod_base = OTHER; note = 2'-deoxythymidine-3'-phosphorothioate
  misc_feature 1..19: note = RNA
  misc_feature 20..21: note = DNA
gaatcaacacaacaactaatt

SEQ ID NO: 692 - DNA, 21 bp, synthetic construct
  source 1..21: mol_type = other DNA
  modified_base 1: mod_base = OTHER; note = uridine-3'-phosphate
  modified_base 2: mod_base = OTHER; note = 2'-O-methyluridine-3'-phosphate
  modified_base 3: mod_base = OTHER; note = adenosine-3'-phosphate
  modified_base 4: mod_base = OTHER; note = guanosine-3'-phosphate
  modified_base 5: mod_base = OTHER; note = uridine-3'-phosphate
  modified_base 6: mod_base = OTHER; note = uridine-3'-phosphate
  modified_base 7: mod_base = OTHER; note = guanosine-3'-phosphate
  modified_base 8: mod_base = OTHER; note = uridine-3'-phosphate
  modified_base 9: mod_base = OTHER; note = uridine-3'-phosphate
  modified_base 10: mod_base = OTHER; note = guanosine-3'-phosphate
  modified_base 11: mod_base = OTHER; note = uridine-3'-phosphate
  modified_base 12: mod_base = OTHER; note = guanosine-3'-phosphate
  modified_base 13: mod_base = OTHER; note = uridine-3'-phosphate
  modified_base 14: mod_base = OTHER; note = uridine-3'-phosphate
  modified_base 15: mod_base = OTHER; note = guanosine-3'-phosphate
  modified_base 16: mod_base = OTHER; note = adenosine-3'-phosphate
  modified_base 17: mod_base = OTHER; note = uridine-3'-phosphate
  modified_base 18: mod_base = OTHER; note = uridine-3'-phosphate
  modified_base 19: mod_base = OTHER; note = cytidine-3'-phosphate
  modified_base 20: mod_base = OTHER; note = 2'-deoxythymidine-3'-phosphorothioate
  misc_feature 1..19: note = RNA
  misc_feature 20..21: note = DNA
ttagttgttgtgttgattctt

SEQ ID NO: 693 - DNA, 21 bp, synthetic construct
  source 1..21: mol_type = other DNA
  modified_base 1: mod_base = OTHER; note = adenosine-3'-phosphate
  modified_base 2: mod_base = OTHER; note = adenosine-3'-phosphate
  modified_base 3: mod_base = OTHER; note = 2'-O-methyluridine-3'-phosphate
  modified_base 4: mod_base = OTHER; note = 2'-O-methylcytidine-3'-phosphate
  modified_base 5: mod_base = OTHER; note = adenosine-3'-phosphate
  modified_base 6: mod_base = OTHER; note = adenosine-3'-phosphate
  modified_base 7: mod_base = OTHER; note = 2'-O-methylcytidine-3'-phosphate
  modified_base 8: mod_base = OTHER; note = adenosine-3'-phosphate
  modified_base 9: mod_base = OTHER; note = 2'-O-methylcytidine-3'-phosphate
  modified_base 10: mod_base = OTHER; note = adenosine-3'-phosphate
  modified_base 11: mod_base = OTHER; note = adenosine-3'-phosphate
  modified_base 12: mod_base = OTHER; note = 2'-O-methylcytidine-3'-phosphate
  modified_base 13: mod_base = OTHER; note = adenosine-3'-phosphate
  modified_base 14: mod_base = OTHER; note = adenosine-3'-phosphate
  modified_base 15: mod_base = OTHER; note = 2'-O-methylcytidine-3'-phosphate
  modified_base 16: mod_base = OTHER; note = 2'-O-methyluridine-3'-phosphate
  modified_base 17: mod_base = OTHER; note = adenosine-3'-phosphate
  modified_base 18: mod_base = OTHER; note = adenosine-3'-phosphate
  modified_base 19: mod_base = OTHER; note = 2'-O-methyluridine-3'-phosphate
  modified_base 20: mod_base = OTHER; note = 2'-deoxythymidine-3'-phosphorothioate
  misc_feature 1..19: note = RNA
  misc_feature 20..21: note = DNA
aatcaacacaacaactaattt

SEQ ID NO: 694 - DNA, 21 bp, synthetic construct
  source 1..21: mol_type = other DNA
  modified_base 1: mod_base = OTHER; note = adenosine-3'-phosphate
  modified_base 2: mod_base = OTHER; note = uridine-3'-phosphate
  modified_base 3: mod_base = OTHER; note = 2'-O-methyluridine-3'-phosphate
  modified_base 4: mod_base = OTHER; note = adenosine-3'-phosphate
  modified_base 5: mod_base = OTHER; note = guanosine-3'-phosphate
  modified_base 6: mod_base = OTHER; note = uridine-3'-phosphate
  modified_base 7: mod_base = OTHER; note = uridine-3'-phosphate
  modified_base 8: mod_base = OTHER; note = guanosine-3'-phosphate
  modified_base 9: mod_base = OTHER; note = uridine-3'-phosphate
  modified_base 10: mod_base = OTHER; note = uridine-3'-phosphate
  modified_base 11: mod_base = OTHER; note = guanosine-3'-phosphate
  modified_base 12: mod_base = OTHER; note = uridine-3'-phosphate
  modified_base 13: mod_base = OTHER; note = guanosine-3'-phosphate
  modified_base 14: mod_base = OTHER; note = uridine-3'-phosphate
  modified_base 15: mod_base = OTHER; note = uridine-3'-phosphate
  modified_base 16: mod_base = OTHER; note = guanosine-3'-phosphate
  modified_base 17: mod_base = OTHER; note = adenosine-3'-phosphate
  modified_base 18: mod_base = OTHER; note = uridine-3'-phosphate
  modified_base 19: mod_base = OTHER; note = uridine-3'-phosphate
  modified_base 20: mod_base = OTHER; note = 2'-deoxythymidine-3'-phosphorothioate
  misc_feature 1..19: note = RNA
  misc_feature 20..21: note = DNA
attagttgttgtgttgatttt

SEQ ID NO: 695 - DNA, 21 bp, synthetic construct
  source 1..21: mol_type = other DNA
  modified_base 1: mod_base = OTHER; note = 2'-O-methyluridine-3'-phosphate
  modified_base 2: mod_base = OTHER; note = 2'-O-methyluridine-3'-phosphate
  modified_base 3: mod_base = OTHER; note = 2'-O-methylcytidine-3'-phosphate
  modified_base 4: mod_base = OTHER; note = 2'-O-methyluridine-3'-phosphate
  modified_base 5: mod_base = OTHER; note = adenosine-3'-phosphate
  modified_base 6: mod_base = OTHER; note = 2'-O-methylcytidine-3'-phosphate
  modified_base 7: mod_base = OTHER; note = 2'-O-methyluridine-3'-phosphate
  modified_base 8: mod_base = OTHER; note = guanosine-3'-phosphate
  modified_base 9: mod_base = OTHER; note = 2'-O-methylcytidine-3'-phosphate
  modified_base 10: mod_base = OTHER; note = adenosine-3'-phosphate
  modified_base 11: mod_base = OTHER; note = 2'-O-methylcytidine-3'-phosphate
  modified_base 12: mod_base = OTHER; note = 2'-O-methyluridine-3'-phosphate
  modified_base 13: mod_base = OTHER; note = 2'-O-methyluridine-3'-phosphate
  modified_base 14: mod_base = OTHER; note = 2'-O-methyluridine-3'-phosphate
  modified_base 15: mod_base = OTHER; note = 2'-O-methyluridine-3'-phosphate
  modified_base 16: mod_base = OTHER; note = adenosine-3'-phosphate
  modified_base 17: mod_base = OTHER; note = guanosine-3'-phosphate
  modified_base 18: mod_base = OTHER; note = guanosine-3'-phosphate
  modified_base 19: mod_base = OTHER; note = adenosine-3'-phosphate
  modified_base 20: mod_base = OTHER; note = 2'-deoxythymidine-3'-phosphorothioate
  misc_feature 1..19: note = RNA
  misc_feature 20..21: note = DNA
ttctactgcacttttaggatt

SEQ ID NO: 696 - DNA, 21 bp, synthetic construct
  source 1..21: mol_type = other DNA
  modified_base 1: mod_base = OTHER; note = uridine-3'-phosphate
  modified_base 2: mod_base = OTHER; note = cytidine-3'-phosphate
  modified_base 3: mod_base = OTHER; note = cytidine-3'-phosphate
  modified_base 4: mod_base = OTHER; note = 2'-O-methyluridine-3'-phosphate
  modified_base 5: mod_base = OTHER; note = adenosine-3'-phosphate
  modified_base 6: mod_base = OTHER; note = adenosine-3'-phosphate
  modified_base 7: mod_base = OTHER; note = adenosine-3'-phosphate
  modified_base 8: mod_base = OTHER; note = adenosine-3'-phosphate
  modified_base 9: mod_base = OTHER; note = guanosine-3'-phosphate
  modified_base 10: mod_base = OTHER; note = uridine-3'-phosphate
  modified_base 11: mod_base = OTHER; note = guanosine-3'-phosphate
  modified_base 12: mod_base = OTHER; note = 2'-O-methylcytidine-3'-phosphate
  modified_base 13: mod_base = OTHER; note = adenosine-3'-phosphate
  modified_base 14: mod_base = OTHER; note = guanosine-3'-phosphate
  modified_base 15: mod_base = OTHER; note = 2'-O-methyluridine-3'-phosphate
  modified_base 16: mod_base = OTHER; note = adenosine-3'-phosphate
  modified_base 17: mod_base = OTHER; note = guanosine-3'-phosphate
  modified_base 18: mod_base = OTHER; note = adenosine-3'-phosphate
  modified_base 19: mod_base = OTHER; note = adenosine-3'-phosphate
  modified_base 20: mod_base = OTHER; note = 2'-deoxythymidine-3'-phosphorothioate
  misc_feature 1..19: note = RNA
  misc_feature 20..21: note = DNA
tcctaaaagtgcagtagaatt

SEQ ID NO: 697 - DNA, 21 bp, synthetic construct
  source 1..21: mol_type = other DNA
  modified_base 1: mod_base = OTHER; note = guanosine-3'-phosphate
  modified_base 2: mod_base = OTHER; note = 2'-O-methylcytidine-3'-phosphate
  modified_base 3: mod_base = OTHER; note = adenosine-3'-phosphate
  modified_base 4: mod_base = OTHER; note = 2'-O-methylcytidine-3'-phosphate
  modified_base 5: mod_base = OTHER; note = 2'-O-methyluridine-3'-phosphate
  modified_base 6: mod_base = OTHER; note = 2'-O-methyluridine-3'-phosphate
  modified_base 7: mod_base = OTHER; note = 2'-O-methyluridine-3'-phosphate
  modified_base 8: mod_base = OTHER; note = 2'-O-methyluridine-3'-phosphate
  modified_base 9: mod_base = OTHER; note = adenosine-3'-phosphate
  modified_base 10: mod_base = OTHER; note = guanosine-3'-phosphate
  modified_base 11: mod_base = OTHER; note = guanosine-3'-phosphate
  modified_base 12: mod_base = OTHER; note = adenosine-3'-phosphate
  modified_base 13: mod_base = OTHER; note = guanosine-3'-phosphate
  modified_base 14: mod_base = OTHER; note = adenosine-3'-phosphate
  modified_base 15: mod_base = OTHER; note = 2'-O-methyluridine-3'-phosphate
  modified_base 16: mod_base = OTHER; note = 2'-O-methyluridine-3'-phosphate
  modified_base 17: mod_base = OTHER; note = adenosine-3'-phosphate
  modified_base 18: mod_base = OTHER; note = guanosine-3'-phosphate
  modified_base 19: mod_base = OTHER; note = adenosine-3'-phosphate
  modified_base 20: mod_base = OTHER; note = 2'-deoxythymidine-3'-phosphorothioate
  misc_feature 1..19: note = RNA
  misc_feature 20..21: note = DNA
gcacttttaggagattagatt

SEQ ID NO: 698 - DNA, 21 bp, synthetic construct
  source 1..21: mol_type = other DNA
  modified_base 1: mod_base = OTHER; note = uridine-3'-phosphate
  modified_base 2: mod_base = OTHER; note = cytidine-3'-phosphate
  modified_base 3: mod_base = OTHER; note = 2'-O-methyluridine-3'-phosphate
  modified_base 4: mod_base = OTHER; note = adenosine-3'-phosphate
  modified_base 5: mod_base = OTHER; note = adenosine-3'-phosphate
  modified_base 6: mod_base = OTHER; note = uridine-3'-phosphate
  modified_base 7: mod_base = OTHER; note = cytidine-3'-phosphate
  modified_base 8: mod_base = OTHER; note = uridine-3'-phosphate
  modified_base 9: mod_base = OTHER; note = cytidine-3'-phosphate
  modified_base 10: mod_base = OTHER; note = cytidine-3'-phosphate
  modified_base 11: mod_base = OTHER; note = 2'-O-methyluridine-3'-phosphate
  modified_base 12: mod_base = OTHER; note = adenosine-3'-phosphate
  modified_base 13: mod_base = OTHER; note = adenosine-3'-phosphate
  modified_base 14: mod_base = OTHER; note = adenosine-3'-phosphate
  modified_base 15: mod_base = OTHER; note = adenosine-3'-phosphate
  modified_base 16: mod_base = OTHER; note = guanosine-3'-phosphate
  modified_base 17: mod_base = OTHER; note = uridine-3'-phosphate
  modified_base 18: mod_base = OTHER; note = guanosine-3'-phosphate
  modified_base 19: mod_base = OTHER; note = cytidine-3'-phosphate
  modified_base 20: mod_base = OTHER; note = 2'-deoxythymidine-3'-phosphorothioate
  misc_feature 1..19: note = RNA
  misc_feature 20..21: note = DNA
tctaatctcctaaaagtgctt

SEQ ID NO: 699 - DNA, 21 bp, synthetic construct
  source 1..21: mol_type = other DNA
  modified_base 1: mod_base = OTHER; note = 2'-O-methyluridine-3'-phosphate
  modified_base 2: mod_base = OTHER; note = 2'-O-methyluridine-3'-phosphate
  modified_base 3: mod_base = OTHER; note = 2'-O-methyluridine-3'-phosphate
  modified_base 4: mod_base = OTHER; note = 2'-O-methyluridine-3'-phosphate
  modified_base 5: mod_base = OTHER; note = adenosine-3'-phosphate
  modified_base 6: mod_base = OTHER; note = guanosine-3'-phosphate
  modified_base 7: mod_base = OTHER; note = guanosine-3'-phosphate
  modified_base 8: mod_base = OTHER; note = adenosine-3'-phosphate
  modified_base 9: mod_base = OTHER; note = guanosine-3'-phosphate
  modified_base 10: mod_base = OTHER; note = adenosine-3'-phosphate
  modified_base 11: mod_base = OTHER; note = 2'-O-methyluridine-3'-phosphate
  modified_base 12: mod_base = OTHER; note = 2'-O-methyluridine-3'-phosphate
  modified_base 13: mod_base = OTHER; note = adenosine-3'-phosphate
  modified_base 14: mod_base = OTHER; note = guanosine-3'-phosphate
  modified_base 15: mod_base = OTHER; note = adenosine-3'-phosphate
  modified_base 16: mod_base = OTHER; note = 2'-O-methyluridine-3'-phosphate
  modified_base 17: mod_base = OTHER; note = 2'-O-methylcytidine-3'-phosphate
  modified_base 18: mod_base = OTHER; note = 2'-O-methylcytidine-3'-phosphate
  modified_base 19: mod_base = OTHER; note = 2'-O-methyluridine-3'-phosphate
  modified_base 20: mod_base = OTHER; note = 2'-deoxythymidine-3'-phosphorothioate
  misc_feature 1..19: note = RNA
  misc_feature 20..21: note = DNA
ttttaggagattagatccttt

SEQ ID NO: 700 - DNA, 21 bp, synthetic construct
  source 1..21: mol_type = other DNA
  modified_base 1: mod_base = OTHER; note = adenosine-3'-phosphate
  modified_base 2: mod_base = OTHER; note = guanosine-3'-phosphate
  modified_base 3: mod_base = OTHER; note = guanosine-3'-phosphate
  modified_base 4: mod_base = OTHER; note = adenosine-3'-phosphate
  modified_base 5: mod_base = OTHER; note = uridine-3'-phosphate
  modified_base 6: mod_base = OTHER; note = cytidine-3'-phosphate
  modified_base 7: mod_base = OTHER; note = 2'-O-methyluridine-3'-phosphate
  modified_base 8: mod_base = OTHER; note = adenosine-3'-phosphate
  modified_base 9: mod_base = OTHER; note = adenosine-3'-phosphate
  modified_base 10: mod_base = OTHER; note = uridine-3'-phosphate
  modified_base 11: mod_base = OTHER; note = cytidine-3'-phosphate
  modified_base 12: mod_base = OTHER; note = uridine-3'-phosphate
  modified_base 13: mod_base = OTHER; note = cytidine-3'-phosphate
  modified_base 14: mod_base = OTHER; note = cytidine-3'-phosphate
  modified_base 15: mod_base = OTHER; note = 2'-O-methyluridine-3'-phosphate
  modified_base 16: mod_base = OTHER; note = adenosine-3'-phosphate
  modified_base 17: mod_base = OTHER; note = adenosine-3'-phosphate
  modified_base 18: mod_base = OTHER; note = adenosine-3'-phosphate
  modified_base 19: mod_base = OTHER; note = adenosine-3'-phosphate
  modified_base 20: mod_base = OTHER; note = 2'-deoxythymidine-3'-phosphorothioate
  misc_feature 1..19: note = RNA
  misc_feature 20..21: note = DNA
aggatctaatctcctaaaatt

SEQ ID NO: 701 - DNA, 21 bp, synthetic construct
  source 1..21: mol_type = other DNA
  modified_base 1: mod_base = OTHER; note = 2'-O-methyluridine-3'-phosphate
  modified_base 2: mod_base = OTHER; note = 2'-O-methyluridine-3'-phosphate
  modified_base 3: mod_base = OTHER; note = adenosine-3'-phosphate
  modified_base 4: mod_base = OTHER; note = guanosine-3'-phosphate
  modified_base 5: mod_base = OTHER; note = guanosine-3'-phosphate
  modified_base 6: mod_base = OTHER; note = adenosine-3'-phosphate
  modified_base 7: mod_base = OTHER; note = guanosine-3'-phosphate
  modified_base 8: mod_base = OTHER; note = adenosine-3'-phosphate
  modified_base 9: mod_base = OTHER; note = 2'-O-methyluridine-3'-phosphate
  modified_base 10: mod_base = OTHER; note = 2'-O-methyluridine-3'-phosphate
  modified_base 11: mod_base = OTHER; note = adenosine-3'-phosphate
  modified_base 12: mod_base = OTHER; note = guanosine-3'-phosphate
  modified_base 13: mod_base = OTHER; note = adenosine-3'-phosphate
  modified_base 14: mod_base = OTHER; note = 2'-O-methyluridine-3'-phosphate
  modified_base 15: mod_base = OTHER; note = 2'-O-methylcytidine-3'-phosphate
  modified_base 16: mod_base = OTHER; note = 2'-O-methylcytidine-3'-phosphate
  modified_base 17: mod_base = OTHER; note = 2'-O-methyluridine-3'-phosphate
  modified_base 18: mod_base = OTHER; note = guanosine-3'-phosphate
  modified_base 19: mod_base = OTHER; note = adenosine-3'-phosphate
  modified_base 20: mod_base = OTHER; note = 2'-deoxythymidine-3'-phosphorothioate
  misc_feature 1..19: note = RNA
  misc_feature 20..21: note = DNA
ttaggagattagatcctgatt

SEQ ID NO: 702 - DNA, 21 bp, synthetic construct
  source 1..21: mol_type = other DNA
  modified_base 1: mod_base = OTHER; note = uridine-3'-phosphate
  modified_base 2: mod_base = OTHER; note = 2'-O-methylcytidine-3'-phosphate
  modified_base 3: mod_base = OTHER; note = adenosine-3'-phosphate
  modified_base 4: mod_base = OTHER; note = guanosine-3'-phosphate
  modified_base 5: mod_base = OTHER; note = guanosine-3'-phosphate
  modified_base 6: mod_base = OTHER; note = adenosine-3'-phosphate
  modified_base 7: mod_base = OTHER; note = uridine-3'-phosphate
  modified_base 8: mod_base = OTHER; note = cytidine-3'-phosphate
  modified_base 9: mod_base = OTHER; note = 2'-O-methyluridine-3'-phosphate
  modified_base 10: mod_base = OTHER; note = adenosine-3'-phosphate
  modified_base 11: mod_base = OTHER; note = adenosine-3'-phosphate
  modified_base 12: mod_base = OTHER; note = uridine-3'-phosphate
  modified_base 13: mod_base = OTHER; note = cytidine-3'-phosphate
  modified_base 14: mod_base = OTHER; note = uridine-3'-phosphate
  modified_base 15: mod_base = OTHER; note = cytidine-3'-phosphate
  modified_base 16: mod_base = OTHER; note = cytidine-3'-phosphate
  modified_base 17: mod_base = OTHER; note = 2'-O-methyluridine-3'-phosphate
  modified_base 18: mod_base = OTHER; note = adenosine-3'-phosphate
  modified_base 19: mod_base = OTHER; note = adenosine-3'-phosphate
  modified_base 20: mod_base = OTHER; note = 2'-deoxythymidine-3'-phosphorothioate
  misc_feature 1..19: note = RNA
  misc_feature 20..21: note = DNA
tcaggatctaatctcctaatt

SEQ ID NO: 703 - DNA, 21 bp, synthetic construct
  source 1..21: mol_type = other DNA
  modified_base 1: mod_base = OTHER; note = 2'-O-methyluridine-3'-phosphate
  modified_base 2: mod_base = OTHER; note = adenosine-3'-phosphate
  modified_base 3: mod_base = OTHER; note = guanosine-3'-phosphate
  modified_base 4: mod_base = OTHER; note = guanosine-3'-phosphate
  modified_base 5: mod_base = OTHER; note = adenosine-3'-phosphate
  modified_base 6: mod_base = OTHER; note = guanosine-3'-phosphate
  modified_base 7: mod_base = OTHER; note = adenosine-3'-phosphate
  modified_base 8: mod_base = OTHER; note = 2'-O-methyluridine-3'-phosphate
  modified_base 9: mod_base = OTHER; note = 2'-O-methyluridine-3'-phosphate
  modified_base 10: mod_base = OTHER; note = adenosine-3'-phosphate
  modified_base 11: mod_base = OTHER; note = guanosine-3'-phosphate
  modified_base 12: mod_base = OTHER; note = adenosine-3'-phosphate
  modified_base 13: mod_base = OTHER; note = 2'-O-methyluridine-3'-phosphate
  modified_base 14: mod_base = OTHER; note = 2'-O-methylcytidine-3'-phosphate
  modified_base 15: mod_base = OTHER; note = 2'-O-methylcytidine-3'-phosphate
  modified_base 16: mod_base = OTHER; note = 2'-O-methyluridine-3'-phosphate
  modified_base 17: mod_base = OTHER; note = guanosine-3'-phosphate
  modified_base 18: mod_base = OTHER; note = adenosine-3'-phosphate
  modified_base 19: mod_base = OTHER; note = guanosine-3'-phosphate
  modified_base 20: mod_base = OTHER; note = 2'-deoxythymidine-3'-phosphorothioate
  misc_feature 1..19: note = RNA
  misc_feature 20..21: note = DNA
taggagattagatcctgagtt

SEQ ID NO: 704 - DNA, 21 bp, synthetic construct
  source 1..21: mol_type = other DNA
  modified_base 1: mod_base = OTHER; note = cytidine-3'-phosphate
  modified_base 2: mod_base = OTHER; note = uridine-3'-phosphate
  modified_base 3: mod_base = OTHER; note = 2'-O-methylcytidine-3'-phosphate
  modified_base 4: mod_base = OTHER; note = adenosine-3'-phosphate
  modified_base 5: mod_base = OTHER; note = guanosine-3'-phosphate
  modified_base 6: mod_base = OTHER; note = guanosine-3'-phosphate
  modified_base 7: mod_base = OTHER; note = adenosine-3'-phosphate
  modified_base 8: mod_base = OTHER; note = uridine-3'-phosphate
  modified_base 9: mod_base = OTHER; note = cytidine-3'-phosphate
  modified_base 10: mod_base = OTHER; note = 2'-O-methyluridine-3'-phosphate
  modified_base 11: mod_base = OTHER; note = adenosine-3'-phosphate
  modified_base 12: mod_base = OTHER; note = adenosine-3'-phosphate
  modified_base 13: mod_base = OTHER; note = uridine-3'-phosphate
  modified_base 14: mod_base = OTHER; note = cytidine-3'-phosphate
  modified_base 15: mod_base = OTHER; note = uridine-3'-phosphate
  modified_base 16: mod_base = OTHER; note = cytidine-3'-phosphate
  modified_base 17: mod_base = OTHER; note = cytidine-3'-phosphate
  modified_base 18: mod_base = OTHER; note = 2'-O-methyluridine-3'-phosphate
  modified_base 19: mod_base = OTHER; note = adenosine-3'-phosphate
  modified_base 20: mod_base = OTHER; note = 2'-deoxythymidine-3'-phosphorothioate
  misc_feature 1..19: note = RNA
  misc_feature 20..21: note = DNA
ctcaggatctaatctcctatt

SEQ ID NO: 705 - DNA, 21 bp, synthetic construct
  source 1..21: mol_type = other DNA
  modified_base 1: mod_base = OTHER; note = adenosine-3'-phosphate
  modified_base 2: mod_base = OTHER; note = guanosine-3'-phosphate
  modified_base 3: mod_base = OTHER; note = guanosine-3'-phosphate
  modified_base 4: mod_base = OTHER; note = adenosine-3'-phosphate
  modified_base 5: mod_base = OTHER; note = guanosine-3'-phosphate
  modified_base 6: mod_base = OTHER; note = adenosine-3'-phosphate
  modified_base 7: mod_base = OTHER; note = 2'-O-methyluridine-3'-phosphate
  modified_base 8: mod_base = OTHER; note = 2'-O-methyluridine-3'-phosphate
  modified_base 9: mod_base = OTHER; note = adenosine-3'-phosphate
  modified_base 10: mod_base = OTHER; note = guanosine-3'-phosphate
  modified_base 11: mod_base = OTHER; note = adenosine-3'-phosphate
  modified_base 12: mod_base = OTHER; note = 2'-O-methyluridine-3'-phosphate
  modified_base 13: mod_base = OTHER; note = 2'-O-methylcytidine-3'-phosphate
  modified_base 14: mod_base = OTHER; note = 2'-O-methylcytidine-3'-phosphate
  modified_base 15: mod_base = OTHER; note = 2'-O-methyluridine-3'-phosphate
  modified_base 16: mod_base = OTHER; note = guanosine-3'-phosphate
  modified_base 17: mod_base = OTHER; note = adenosine-3'-phosphate
  modified_base 18: mod_base = OTHER; note = guanosine-3'-phosphate
  modified_base 19: mod_base = OTHER; note = guanosine-3'-phosphate
  modified_base 20: mod_base = OTHER; note = 2'-deoxythymidine-3'-phosphorothioate
  misc_feature 1..19: note = RNA
  misc_feature 20..21: note = DNA
aggagattagatcctgaggtt

SEQ ID NO: 706 - DNA, 21 bp, synthetic construct
  source 1..21: mol_type = other DNA
  modified_base 1: mod_base = OTHER; note = cytidine-3'-phosphate
  modified_base 2: mod_base = OTHER; note = cytidine-3'-phosphate
  modified_base 3: mod_base = OTHER; note = uridine-3'-phosphate
  modified_base 4: mod_base = OTHER; note = 2'-O-methylcytidine-3'-phosphate
  modified_base 5: mod_base = OTHER; note = adenosine-3'-phosphate
  modified_base 6: mod_base = OTHER; note = guanosine-3'-phosphate
  modified_base 7: mod_base = OTHER; note = guanosine-3'-phosphate
  modified_base 8: mod_base = OTHER; note = adenosine-3'-phosphate
  modified_base 9: mod_base = OTHER; note = uridine-3'-phosphate
  modified_base 10: mod_base = OTHER; note = cytidine-3'-phosphate
  modified_base 11: mod_base = OTHER; note = 2'-O-methyluridine-3'-phosphate
  modified_base 12: mod_base = OTHER; note = adenosine-3'-phosphate
  modified_base 13: mod_base = OTHER; note = adenosine-3'-phosphate
  modified_base 14: mod_base = OTHER; note = uridine-3'-phosphate
  modified_base 15: mod_base = OTHER; note = cytidine-3'-phosphate
  modified_base 16: mod_base = OTHER; note = uridine-3'-phosphate
  modified_base 17: mod_base = OTHER; note = cytidine-3'-phosphate
  modified_base 18: mod_base = OTHER; note = cytidine-3'-phosphate
  modified_base 19: mod_base = OTHER; note = uridine-3'-phosphate
  modified_base 20: mod_base = OTHER; note = 2'-deoxythymidine-3'-phosphorothioate
  misc_feature 1..19: note = RNA
  misc_feature 20..21: note = DNA
cctcaggatctaatctccttt

SEQ ID NO: 707 - DNA, 21 bp, synthetic construct
  source 1..21: mol_type = other DNA
  modified_base 1: mod_base = OTHER; note = guanosine-3'-phosphate
  modified_base 2: mod_base = OTHER; note = guanosine-3'-phosphate
  modified_base 3: mod_base = OTHER; note = adenosine-3'-phosphate
  modified_base 4: mod_base = OTHER; note = guanosine-3'-phosphate
  modified_base 5: mod_base = OTHER; note = adenosine-3'-phosphate
  modified_base 6: mod_base = OTHER; note = 2'-O-methyluridine-3'-phosphate
  modified_base 7: mod_base = OTHER; note = 2'-O-methyluridine-3'-phosphate
  modified_base 8: mod_base = OTHER; note = adenosine-3'-phosphate
  modified_base 9: mod_base = OTHER; note = guanosine-3'-phosphate
  modified_base 10: mod_base = OTHER; note = adenosine-3'-phosphate
  modified_base 11: mod_base = OTHER; note = 2'-O-methyluridine-3'-phosphate
  modified_base 12: mod_base = OTHER; note = 2'-O-methylcytidine-3'-phosphate
  modified_base 13: mod_base = OTHER; note = 2'-O-methylcytidine-3'-phosphate
  modified_base 14: mod_base = OTHER; note = 2'-O-methyluridine-3'-phosphate
  modified_base 15: mod_base = OTHER; note = guanosine-3'-phosphate
  modified_base 16: mod_base = OTHER; note = adenosine-3'-phosphate
  modified_base 17: mod_base = OTHER; note = guanosine-3'-phosphate
  modified_base 18: mod_base = OTHER; note = guanosine-3'-phosphate
  modified_base 19: mod_base = OTHER; note = adenosine-3'-phosphate
  modified_base 20: mod_base = OTHER; note = 2'-deoxythymidine-3'-phosphorothioate
  misc_feature 1..19: note = RNA
  misc_feature 20..21: note = DNA
ggagattagatcctgaggatt

SEQ ID NO: 708 - DNA, 21 bp, synthetic construct
  source 1..21: mol_type = other DNA
  modified_base 1: mod_base = OTHER; note = uridine-3'-phosphate
  modified_base 2: mod_base = OTHER; note = cytidine-3'-phosphate
  modified_base 3: mod_base = OTHER; note = cytidine-3'-phosphate
  modified_base 4: mod_base = OTHER; note = uridine-3'-phosphate
  modified_base 5: mod_base = OTHER; note = 2'-O-methylcytidine-3'-phosphate
  modified_base 6: mod_base = OTHER; note = adenosine-3'-phosphate
  modified_base 7: mod_base = OTHER; note = guanosine-3'-phosphate
  modified_base 8: mod_base = OTHER; note = guanosine-3'-phosphate
  modified_base 9: mod_base = OTHER; note = adenosine-3'-phosphate
  modified_base 10: mod_base = OTHER; note = uridine-3'-phosphate
  modified_base 11: mod_base = OTHER; note = cytidine-3'-phosphate
  modified_base 12: mod_base = OTHER; note = 2'-O-methyluridine-3'-phosphate
  modified_base 13: mod_base = OTHER; note = adenosine-3'-phosphate
  modified_base 14: mod_base = OTHER; note = adenosine-3'-phosphate
  modified_base 15: mod_base = OTHER; note = uridine-3'-phosphate
  modified_base 16: mod_base = OTHER; note = cytidine-3'-phosphate
  modified_base 17: mod_base = OTHER; note = uridine-3'-phosphate
  modified_base 18: mod_base = OTHER; note = cytidine-3'-phosphate
  modified_base 19: mod_base = OTHER; note = cytidine-3'-phosphate
  modified_base 20: mod_base = OTHER; note = 2'-deoxythymidine-3'-phosphorothioate
  misc_feature 1..19: note = RNA
  misc_feature 20..21: note = DNA
tcctcaggatctaatctcctt

SEQ ID NO: 709 - DNA, 21 bp, synthetic construct
  source 1..21: mol_type = other DNA
  modified_base 1: mod_base = OTHER; note = adenosine-3'-phosphate
  modified_base 2: mod_base = OTHER; note = adenosine-3'-phosphate
  modified_base 3: mod_base = OTHER; note = adenosine-3'-phosphate
  modified_base 4: mod_base = OTHER; note = 2'-O-methylcytidine-3'-phosphate
  modified_base 5: mod_base = OTHER; note = 2'-O-methylcytidine-3'-phosphate
  modified_base 6: mod_base = OTHER; note = adenosine-3'-phosphate
  modified_base 7: mod_base = OTHER; note = 2'-O-methyluridine-3'-phosphate
  modified_base 8: mod_base = OTHER; note = adenosine-3'-phosphate
  modified_base 9: mod_base = OTHER; note = 2'-O-methylcytidine-3'-phosphate
  modified_base 10: mod_base = OTHER; note = adenosine-3'-phosphate
  modified_base 11: mod_base = OTHER; note = guanosine-3'-phosphate
  modified_base 12: mod_base = OTHER; note = 2'-O-methylcytidine-3'-phosphate
  modified_base 13: mod_base = OTHER; note = 2'-O-methyluridine-3'-phosphate
  modified_base 14: mod_base = OTHER; note = guanosine-3'-phosphate
  modified_base 15: mod_base = OTHER; note = adenosine-3'-phosphate
  modified_base 16: mod_base = OTHER; note = adenosine-3'-phosphate
  modified_base 17: mod_base = OTHER; note = 2'-O-methyluridine-3'-phosphate
  modified_base 18: mod_base = OTHER; note = 2'-O-methyluridine-3'-phosphate
  modified_base 19: mod_base = OTHER; note = guanosine-3'-phosphate
  modified_base 20: mod_base = OTHER; note = 2'-deoxythymidine-3'-phosphorothioate
  misc_feature 1..19: note = RNA
  misc_feature 20..21: note = DNA
aaaccatacagctgaattgtt

SEQ ID NO: 710 - DNA, 21 bp, synthetic construct
  source 1..21: mol_type = other DNA
  modified_base 1: mod_base = OTHER; note = 2'-O-methylcytidine-3'-phosphate
  modified_base 2: mod_base = OTHER; note = adenosine-3'-phosphate
  modified_base 3: mod_base = OTHER; note = adenosine-3'-phosphate
  modified_base 4: mod_base = OTHER; note = uridine-3'-phosphate
  modified_base 5: mod_base = OTHER; note = uridine-3'-phosphate
  modified_base 6: mod_base = OTHER; note = 2'-O-methylcytidine-3'-phosphate
  modified_base 7: mod_base = OTHER; note = adenosine-3'-phosphate
  modified_base 8: mod_base = OTHER; note = guanosine-3'-phosphate
  modified_base 9: mod_base = OTHER; note = cytidine-3'-phosphate
  modified_base 10: mod_base = OTHER; note = uridine-3'-phosphate
  modified_base 11: mod_base = OTHER; note = guanosine-3'-phosphate
  modified_base 12: mod_base = OTHER; note = 2'-O-methyluridine-3'-phosphate
  modified_base 13: mod_base = OTHER; note = adenosine-3'-phosphate
  modified_base 14: mod_base = OTHER; note = uridine-3'-phosphate
  modified_base 15: mod_base = OTHER; note = guanosine-3'-phosphate
  modified_base 16: mod_base = OTHER; note = guanosine-3'-phosphate
  modified_base 17: mod_base = OTHER; note = uridine-3'-phosphate
  modified_base 18: mod_base = OTHER; note = uridine-3'-phosphate
  modified_base 19: mod_base = OTHER; note = uridine-3'-phosphate
  modified_base 20: mod_base = OTHER; note = 2'-deoxythymidine-3'-phosphorothioate
  misc_feature 1..19: note = RNA
  misc_feature 20..21: note = DNA
caattcagctgtatggttttt

SEQ ID NO: 711 - DNA, 21 bp, synthetic construct
  source 1..21: mol_type = other DNA
  modified_base 1: mod_base = OTHER; note = adenosine-3'-phosphate
  modified_base 2: mod_base = OTHER; note = adenosine-3'-phosphate
  modified_base 3: mod_base = OTHER; note = 2'-O-methylcytidine-3'-phosphate
  modified_base 4: mod_base = OTHER; note = 2'-O-methylcytidine-3'-phosphate
  modified_base 5: mod_base = OTHER; note = adenosine-3'-phosphate
  modified_base 6: mod_base = OTHER; note = 2'-O-methyluridine-3'-phosphate
  modified_base 7: mod_base = OTHER; note = adenosine-3'-phosphate
  modified_base 8: mod_base = OTHER; note = 2'-O-methylcytidine-3'-phosphate
  modified_base 9: mod_base = OTHER; note = adenosine-3'-phosphate
  modified_base 10: mod_base = OTHER; note = guanosine-3'-phosphate
  modified_base 11: mod_base = OTHER; note = 2'-O-methylcytidine-3'-phosphate
  modified_base 12: mod_base = OTHER; note = 2'-O-methyluridine-3'-phosphate
  modified_base 13: mod_base = OTHER; note = guanosine-3'-phosphate
  modified_base 14: mod_base = OTHER; note = adenosine-3'-phosphate
  modified_base 15: mod_base = OTHER; note = adenosine-3'-phosphate
  modified_base 16: mod_base = OTHER; note = 2'-O-methyluridine-3'-phosphate
  modified_base 17: mod_base = OTHER; note = 2'-O-methyluridine-3'-phosphate
  modified_base 18: mod_base = OTHER; note = guanosine-3'-phosphate
  modified_base 19: mod_base = OTHER; note = guanosine-3'-phosphate
  modified_base 20: mod_base = OTHER; note = 2'-deoxythymidine-3'-phosphorothioate
  misc_feature 1..19: note = RNA
  misc_feature 20..21: note = DNA
aaccatacagctgaattggtt

SEQ ID NO: 712 - DNA, 21 bp, synthetic construct
  source 1..21: mol_type = other DNA
  modified_base 1: mod_base = OTHER; note = cytidine-3'-phosphate
  modified_base 2: mod_base = OTHER; note = 2'-O-methylcytidine-3'-phosphate
  modified_base 3: mod_base = OTHER; note = adenosine-3'-phosphate
  modified_base 4: mod_base = OTHER; note = adenosine-3'-phosphate
  modified_base 5: mod_base = OTHER; note = uridine-3'-phosphate
  modified_base 6: mod_base = OTHER; note = uridine-3'-phosphate
  modified_base 7: mod_base = OTHER; note = 2'-O-methylcytidine-3'-phosphate
  modified_base 8: mod_base = OTHER; note = adenosine-3'-phosphate
  modified_base 9: mod_base = OTHER; note = guanosine-3'-phosphate
  modified_base 10: mod_base = OTHER; note = cytidine-3'-phosphate
  modified_base 11: mod_base = OTHER; note = uridine-3'-phosphate
  modified_base 12: mod_base = OTHER; note = guanosine-3'-phosphate
  modified_base 13: mod_base = OTHER; note = 2'-O-methyluridine-3'-phosphate
  modified_base 14: mod_base = OTHER; note = adenosine-3'-phosphate
  modified_base 15: mod_base = OTHER; note = uridine-3'-phosphate
  modified_base 16: mod_base = OTHER; note = guanosine-3'-phosphate
  modified_base 17: mod_base = OTHER; note = guanosine-3'-phosphate
  modified_base 18: mod_base = OTHER; note = uridine-3'-phosphate
  modified_base 19: mod_base = OTHER; note = uridine-3'-phosphate
  modified_base 20: mod_base = OTHER; note = 2'-deoxythymidine-3'-phosphorothioate
  misc_feature 1..19: note = RNA
  misc_feature 20..21: note = DNA
ccaattcagctgtatggtttt

SEQ ID NO: 713 - DNA, 21 bp, synthetic construct
  source 1..21: mol_type = other DNA
  modified_base 1: mod_base = OTHER; note = 2'-O-methylcytidine-3'-phosphate
  modified_base 2: mod_base = OTHER; note = 2'-O-methylcytidine-3'-phosphate
  modified_base 3: mod_base = OTHER; note = adenosine-3'-phosphate
  modified_base 4: mod_base = OTHER; note = 2'-O-methyluridine-3'-phosphate
  modified_base 5: mod_base = OTHER; note = adenosine-3'-phosphate
  modified_base 6: mod_base = OTHER; note = 2'-O-methylcytidine-3'-phosphate
  modified_base 7: mod_base = OTHER; note = adenosine-3'-phosphate
  modified_base 8: mod_base = OTHER; note = guanosine-3'-phosphate
  modified_base 9: mod_base = OTHER; note = 2'-O-methylcytidine-3'-phosphate
  modified_base 10: mod_base = OTHER; note = 2'-O-methyluridine-3'-phosphate
  modified_base 11: mod_base = OTHER; note = guanosine-3'-phosphate
  modified_base 12: mod_base = OTHER; note = adenosine-3'-phosphate
  modified_base 13: mod_base = OTHER; note = adenosine-3'-phosphate
  modified_base 14: mod_base = OTHER; note = 2'-O-methyluridine-3'-phosphate
  modified_base 15: mod_base = OTHER; note = 2'-O-methyluridine-3'-phosphate
  modified_base 16: mod_base = OTHER; note = guanosine-3'-phosphate
  modified_base 17: mod_base = OTHER; note = guanosine-3'-phosphate
  modified_base 18: mod_base = OTHER; note = 2'-O-methyluridine-3'-phosphate
  modified_base 19: mod_base = OTHER; note = 2'-O-methylcytidine-3'-phosphate
  modified_base 20: mod_base = OTHER; note = 2'-deoxythymidine-3'-phosphorothioate
  misc_feature 1..19: note = RNA
  misc_feature 20..21: note = DNA
ccatacagctgaattggtctt

SEQ ID NO: 714 - DNA, 21 bp, synthetic construct
  source 1..21: mol_type = other DNA
  modified_base 1: mod_base = OTHER; note = guanosine-3'-phosphate
  modified_base 2: mod_base = OTHER; note = adenosine-3'-phosphate
  modified_base 3: mod_base = OTHER; note = cytidine-3'-phosphate
  modified_base 4: mod_base = OTHER; note = 2'-O-methylcytidine-3'-phosphate
  modified_base 5: mod_base = OTHER; note = adenosine-3'-phosphate
  modified_base 6: mod_base = OTHER; note = adenosine-3'-phosphate
  modified_base 7: mod_base = OTHER; note = uridine-3'-phosphate
  modified_base 8: mod_base = OTHER; note = uridine-3'-phosphate
  modified_base 9: mod_base = OTHER; note = 2'-O-methylcytidine-3'-phosphate
  modified_base 10: mod_base = OTHER; note = adenosine-3'-phosphate
  modified_base 11: mod_base = OTHER; note = guanosine-3'-phosphate
  modified_base 12: mod_base = OTHER; note = cytidine-3'-phosphate
  modified_base 13: mod_base = OTHER; note = uridine-3'-phosphate
  modified_base 14: mod_base = OTHER; note = guanosine-3'-phosphate
  modified_base 15: mod_base = OTHER; note = 2'-O-methyluridine-3'-phosphate
  modified_base 16: mod_base = OTHER; note = adenosine-3'-phosphate
  modified_base 17: mod_base = OTHER; note = uridine-3'-phosphate
  modified_base 18: mod_base = OTHER; note = guanosine-3'-phosphate
  modified_base 19: mod_base = OTHER; note = guanosine-3'-phosphate
  modified_base 20: mod_base = OTHER; note = 2'-deoxythymidine-3'-phosphorothioate
  misc_feature 1..19: note = RNA
  misc_feature 20..21: note = DNA
gaccaattcagctgtatggtt

SEQ ID NO: 715 - DNA, 21 bp, synthetic construct
  source 1..21: mol_type = other DNA
  modified_base 1: mod_base = OTHER; note = adenosine-3'-phosphate
  modified_base 2: mod_base = OTHER; note = 2'-O-methyluridine-3'-phosphate
  modified_base 3: mod_base = OTHER; note = adenosine-3'-phosphate
  modified_base 4: mod_base = OTHER; note = 2'-O-methylcytidine-3'-phosphate
  modified_base 5: mod_base = OTHER; note = adenosine-3'-phosphate
  modified_base 6: mod_base = OTHER; note = guanosine-3'-phosphate
  modified_base 7: mod_base = OTHER; note = 2'-O-methylcytidine-3'-phosphate
  modified_base 8: mod_base = OTHER; note = 2'-O-methyluridine-3'-phosphate
  modified_base 9: mod_base = OTHER; note = guanosine-3'-phosphate
  modified_base 10: mod_base = OTHER; note = adenosine-3'-phosphate
  modified_base 11: mod_base = OTHER; note = adenosine-3'-phosphate
  modified_base 12: mod_base = OTHER; note = 2'-O-methyluridine-3'-phosphate
  modified_base 13: mod_base = OTHER; note = 2'-O-methyluridine-3'-phosphate
  modified_base 14: mod_base = OTHER; note = guanosine-3'-phosphate
  modified_base 15: mod_base = OTHER; note = guanosine-3'-phosphate
  modified_base 16: mod_base = OTHER; note = 2'-O-methyluridine-3'-phosphate
  modified_base 17: mod_base = OTHER; note = 2'-O-methylcytidine-3'-phosphate
  modified_base 18: mod_base = OTHER; note = adenosine-3'-phosphate
  modified_base 19: mod_base = OTHER; note = 2'-O-methyluridine-3'-phosphate
  modified_base 20: mod_base = OTHER; note = 2'-deoxythymidine-3'-phosphorothioate
  misc_feature 1..19: note = RNA
  misc_feature 20..21: note = DNA
atacagctgaattggtcattt

SEQ ID NO: 716 - DNA, 21 bp, synthetic construct
  source 1..21: mol_type = other DNA
  modified_base 1: mod_base = OTHER; note = adenosine-3'-phosphate
  modified_base 2: mod_base = OTHER; note = uridine-3'-phosphate
  modified_base 3: mod_base = OTHER; note = guanosine-3'-phosphate
  modified_base 4: mod_base = OTHER; note = adenosine-3'-phosphate
  modified_base 5: mod_base = OTHER; note = cytidine-3'-phosphate
  modified_base 6: mod_base = OTHER; note = 2'-O-methylcytidine-3'-phosphate
  modified_base 7: mod_base = OTHER; note = adenosine-3'-phosphate
  modified_base 8: mod_base = OTHER; note = adenosine-3'-phosphate
  modified_base 9: mod_base = OTHER; note = uridine-3'-phosphate
  modified_base 10: mod_base = OTHER; note = uridine-3'-phosphate
  modified_base 11: mod_base = OTHER; note = 2'-O-methylcytidine-3'-phosphate
  modified_base 12: mod_base = OTHER; note = adenosine-3'-phosphate
  modified_base 13: mod_base = OTHER; note = guanosine-3'-phosphate
  modified_base 14: mod_base = OTHER; note = cytidine-3'-phosphate
  modified_base 15: mod_base = OTHER; note = uridine-3'-phosphate
  modified_base 16: mod_base = OTHER; note = guanosine-3'-phosphate
  modified_base 17: mod_base = OTHER; note = 2'-O-methyluridine-3'-phosphate
  modified_base 18: mod_base = OTHER; note = adenosine-3'-phosphate
  modified_base 19: mod_base = OTHER; note = uridine-3'-phosphate
  modified_base 20: mod_base = OTHER; note = 2'-deoxythymidine-3'-phosphorothioate
  misc_feature 1..19: note = RNA
  misc_feature 20..21: note = DNA
atgaccaattcagctgtattt

SEQ ID NO: 717 - DNA, 21 bp, synthetic construct
  source 1..21: mol_type = other DNA
  modified_base 1: mod_base = OTHER; note = guanosine-3'-phosphate
  modified_base 2: mod_base = OTHER; note = 2'-O-methylcytidine-3'-phosphate
  modified_base 3: mod_base = OTHER; note = 2'-O-methyluridine-3'-phosphate
  modified_base 4: mod_base = OTHER; note = guanosine-3'-phosphate
  modified_base 5: mod_base = OTHER; note = adenosine-3'-phosphate
  modified_base 6: mod_base = OTHER; note = adenosine-3'-phosphate
  modified_base 7: mod_base = OTHER; note = 2'-O-methyluridine-3'-phosphate
  modified_base 8: mod_base = OTHER; note = 2'-O-methyluridine-3'-phosphate
  modified_base 9: mod_base = OTHER; note = guanosine-3'-phosphate
  modified_base 10: mod_base = OTHER; note = guanosine-3'-phosphate
  modified_base 11: mod_base = OTHER; note = 2'-O-methyluridine-3'-phosphate
  modified_base 12: mod_base = OTHER; note = 2'-O-methylcytidine-3'-phosphate
  modified_base 13: mod_base = OTHER; note = adenosine-3'-phosphate
  modified_base 14: mod_base = OTHER; note = 2'-O-methyluridine-3'-phosphate
  modified_base 15: mod_base = OTHER; note = 2'-O-methylcytidine-3'-phosphate
  modified_base 16: mod_base = OTHER; note = 2'-O-methylcytidine-3'-phosphate
  modified_base 17: mod_base = OTHER; note = 2'-O-methylcytidine-3'-phosphate
  modified_base 18: mod_base = OTHER; note = adenosine-3'-phosphate
  modified_base 19: mod_base = OTHER; note = guanosine-3'-phosphate
  modified_base 20: mod_base = OTHER; note = 2'-deoxythymidine-3'-phosphorothioate
  misc_feature 1..19: note = RNA
  misc_feature 20..21: note = DNA
gctgaattggtcatcccagtt

SEQ ID NO: 718 - DNA, 21 bp, synthetic construct
  source 1..21: mol_type = other DNA
  modified_base 1: mod_base = OTHER; note = cytidine-3'-phosphate
  modified_base 2: mod_base = OTHER; note = uridine-3'-phosphate
  modified_base 3: mod_base = OTHER; note = guanosine-3'-phosphate
  modified_base 4: mod_base = OTHER; note = guanosine-3'-phosphate
  modified_base 5: mod_base = OTHER; note = guanosine-3'-phosphate
  modified_base 6: mod_base = OTHER; note = adenosine-3'-phosphate
  modified_base 7: mod_base = OTHER; note = uridine-3'-phosphate
  modified_base 8: mod_base = OTHER; note = guanosine-3'-phosphate
  modified_base 9: mod_base = OTHER; note = adenosine-3'-phosphate
  modified_base 10: mod_base = OTHER; note = cytidine-3'-phosphate
  modified_base 11: mod_base = OTHER; note = 2'-O-methylcytidine-3'-phosphate
  modified_base 12: mod_base = OTHER; note = adenosine-3'-phosphate
  modified_base 13: mod_base = OTHER; note = adenosine-3'-phosphate
  modified_base 14: mod_base = OTHER; note = uridine-3'-phosphate
  modified_base 15: mod_base = OTHER; note = uridine-3'-phosphate
  modified_base 16: mod_base = OTHER; note = 2'-O-methylcytidine-3'-phosphate
  modified_base 17: mod_base = OTHER; note = adenosine-3'-phosphate
  modified_base 18: mod_base = OTHER; note = guanosine-3'-phosphate
  modified_base 19: mod_base = OTHER; note = cytidine-3'-phosphate
  modified_base 20: mod_base = OTHER; note = 2'-deoxythymidine-3'-phosphorothioate
  misc_feature 1..19: note = RNA
  misc_feature 20..21: note = DNA
ctgggatgaccaattcagctt

SEQ ID NO: 719 - DNA, 21 bp, synthetic construct
  source 1..21: mol_type = other DNA
  modified_base 1: mod_base = OTHER; note = guanosine-3'-phosphate
  modified_base 2: mod_base = OTHER; note = guanosine-3'-phosphate
  modified_base 3: mod_base = OTHER; note = 2'-O-methyluridine-3'-phosphate
  modified_base 4: mod_base = OTHER; note = 2'-O-methylcytidine-3'-phosphate
  modified_base 5: mod_base = OTHER; note = adenosine-3'-phosphate
  modified_base 6: mod_base = OTHER; note = 2'-O-methyluridine-3'-phosphate
  modified_base 7: mod_base = OTHER; note = 2'-O-methylcytidine-3'-phosphate
  modified_base 8: mod_base = OTHER; note = 2'-O-methylcytidine-3'-phosphate
  modified_base 9: mod_base = OTHER; note = 2'-O-methylcytidine-3'-phosphate
  modified_base 10: mod_base = OTHER; note = adenosine-3'-phosphate
  modified_base 11: mod_base = OTHER; note = guanosine-3'-phosphate
  modified_base 12: mod_base = OTHER; note = adenosine-3'-phosphate
  modified_base 13: mod_base = OTHER; note = adenosine-3'-phosphate
  modified_base 14: mod_base = OTHER; note = 2'-O-methylcytidine-3'-phosphate
  modified_base 15: mod_base = OTHER; note = 2'-O-methyluridine-3'-phosphate
  modified_base 16: mod_base = OTHER; note = adenosine-3'-phosphate
  modified_base 17: mod_base = OTHER; note = 2'-O-methylcytidine-3'-phosphate
  modified_base 18: mod_base = OTHER; note = 2'-O-methylcytidine-3'-phosphate
  modified_base 19: mod_base = OTHER; note = 2'-O-methyluridine-3'-phosphate
  modified_base 20: mod_base = OTHER; note = 2'-deoxythymidine-3'-phosphorothioate
  misc_feature 1..19: note = RNA
  misc_feature 20..21: note = DNA
ggtcatcccagaactaccttt

SEQ ID NO: 720 - DNA, 21 bp, synthetic construct
  source 1..21: mol_type = other DNA
  modified_base 1: mod_base = OTHER; note = adenosine-3'-phosphate
  modified_base 2: mod_base = OTHER; note = guanosine-3'-phosphate
  modified_base 3: mod_base = OTHER; note = guanosine-3'-phosphate
  modified_base 4: mod_base = OTHER; note = 2'-O-methyluridine-3'-phosphate
  modified_base 5: mod_base = OTHER; note = adenosine-3'-phosphate
  modified_base 6: mod_base = OTHER; note = guanosine-3'-phosphate
  modified_base 7: mod_base = OTHER; note = uridine-3'-phosphate
  modified_base 8: mod_base = OTHER; note = uridine-3'-phosphate
  modified_base 9: mod_base = OTHER; note = cytidine-3'-phosphate
  modified_base 10: mod_base = OTHER; note = uridine-3'-phosphate
  modified_base 11: mod_base = OTHER; note = guanosine-3'-phosphate
  modified_base 12: mod_base = OTHER; note = guanosine-3'-phosphate
  modified_base 13: mod_base = OTHER; note = guanosine-3'-phosphate
  modified_base 14: mod_base = OTHER; note = adenosine-3'-phosphate
  modified_base 15: mod_base = OTHER; note = uridine-3'-phosphate
  modified_base 16: mod_base = OTHER; note = guanosine-3'-phosphate
  modified_base 17: mod_base = OTHER; note = adenosine-3'-phosphate
  modified_base 18: mod_base = OTHER; note = cytidine-3'-phosphate
  modified_base 19: mod_base = OTHER; note = cytidine-3'-phosphate
  modified_base 20: mod_base = OTHER; note = 2'-deoxythymidine-3'-phosphorothioate
  misc_feature 1..19: note = RNA
  misc_feature 20..21: note = DNA
aggtagttctgggatgacctt

SEQ ID NO: 721 - DNA, 21 bp, synthetic construct
  source 1..21: mol_type = other DNA
  modified_base 1: mod_base = OTHER; note = 2'-O-methyluridine-3'-phosphate
  modified_base 2: mod_base = OTHER; note = guanosine-3'-phosphate
  modified_base 3: mod_base = OTHER; note = guanosine-3'-phosphate
  modified_base 4: mod_base = OTHER; note = 2'-O-methylcytidine-3'-phosphate
  modified_base 5: mod_base = OTHER; note = adenosine-3'-phosphate
  modified_base 6: mod_base = OTHER; note = 2'-O-methylcytidine-3'-phosphate
  modified_base 7: mod_base = OTHER; note = adenosine-3'-phosphate
  modified_base 8: mod_base = OTHER; note = 2'-O-methyluridine-3'-phosphate
  modified_base 9: mod_base = OTHER; note = 2'-O-methylcytidine-3'-phosphate
  modified_base 10: mod_base = OTHER; note = 2'-O-methylcytidine-3'-phosphate
  modified_base 11: mod_base = OTHER; note = 2'-O-methyluridine-3'-phosphate
  modified_base 12: mod_base = OTHER; note = 2'-O-methylcytidine-3'-phosphate
  modified_base 13: mod_base = OTHER; note = 2'-O-methylcytidine-3'-phosphate
  modified_base 14: mod_base = OTHER; note = adenosine-3'-phosphate
  modified_base 15: mod_base = OTHER; note = adenosine-3'-phosphate
  modified_base 16: mod_base = OTHER; note = adenosine-3'-phosphate
  modified_base 17: mod_base = OTHER; note = 2'-O-methyluridine-3'-phosphate
  modified_base 18: mod_base = OTHER; note = guanosine-3'-phosphate
  modified_base 19: mod_base = OTHER; note = adenosine-3'-phosphate
  modified_base 20: mod_base = OTHER; note = 2'-deoxythymidine-3'-phosphorothioate
  misc_feature 1..19: note = RNA
  misc_feature 20..21: note = DNA
tggcacatcctccaaatgatt

SEQ ID NO: 722 - DNA, 21 bp, synthetic construct
  source 1..21: mol_type = other DNA
  modified_base 1: mod_base = OTHER; note = uridine-3'-phosphate
  modified_base 2: mod_base = OTHER; note = 2'-O-methylcytidine-3'-phosphate
  modified_base 3: mod_base = OTHER; note = adenosine-3'-phosphate
  modified_base 4: mod_base = OTHER; note = uridine-3'-phosphate
  modified_base 5: mod_base = OTHER; note = uridine-3'-phosphate
  modified_base 6: mod_base = OTHER; note = uridine-3'-phosphate
  modified_base 7: mod_base = OTHER; note = guanosine-3'-phosphate
  modified_base 8: mod_base = OTHER; note = guanosine-3'-phosphate
  modified_base 9: mod_base = OTHER; note = adenosine-3'-phosphate
  modified_base 10: mod_base = OTHER; note = guanosine-3'-phosphate
  modified_base 11: mod_base = OTHER; note = guanosine-3'-phosphate
  modified_base 12: mod_base = OTHER; note = adenosine-3'-phosphate
  modified_base 13: mod_base = OTHER; note = uridine-3'-phosphate
  modified_base 14: mod_base = OTHER; note = guanosine-3'-phosphate
  modified_base 15: mod_base = OTHER; note = uridine-3'-phosphate
  modified_base 16: mod_base = OTHER; note = guanosine-3'-phosphate
  modified_base 17: mod_base = OTHER; note = cytidine-3'-phosphate
  modified_base 18: mod_base = OTHER; note = 2'-O-methylcytidine-3'-phosphate
  modified_base 19: mod_base = OTHER; note = adenosine-3'-phosphate
  modified_base 20: mod_base = OTHER; note = 2'-deoxythymidine-3'-phosphorothioate
  misc_feature 1..19: note = RNA
  misc_feature 20..21: note = DNA
tcatttggaggatgtgccatt

SEQ ID NO: 723 - DNA, 21 bp, synthetic construct
  source 1..21: mol_type = other DNA
  modified_base 1: mod_base = OTHER; note = 2'-O-methyluridine-3'-phosphate
  modified_base 2: mod_base = OTHER; note = guanosine-3'-phosphate
  modified_base 3: mod_base = OTHER; note = adenosine-3'-phosphate
  modified_base 4: mod_base = OTHER; note = adenosine-3'-phosphate
  modified_base 5: mod_base = OTHER; note = adenosine-3'-phosphate
  modified_base 6: mod_base = OTHER; note = guanosine-3'-phosphate
  modified_base 7: mod_base = OTHER; note = guanosine-3'-phosphate
  modified_base 8: mod_base = OTHER; note = adenosine-3'-phosphate
  modified_base 9: mod_base = OTHER; note = 2'-O-methylcytidine-3'-phosphate
  modified_base 10: mod_base = OTHER; note = 2'-O-methyluridine-3'-phosphate
  modified_base 11: mod_base = OTHER; note = 2'-O-methylcytidine-3'-phosphate
  modified_base 12: mod_base = OTHER; note = adenosine-3'-phosphate
  modified_base 13: mod_base = OTHER; note = 2'-O-methylcytidine-3'-phosphate
  modified_base 14: mod_base = OTHER; note = 2'-O-methyluridine-3'-phosphate
  modified_base 15: mod_base = OTHER; note = 2'-O-methyluridine-3'-phosphate
  modified_base 16: mod_base = OTHER; note = guanosine-3'-phosphate
  modified_base 17: mod_base = OTHER; note = guanosine-3'-phosphate
  modified_base 18: mod_base = OTHER; note = 2'-O-methyluridine-3'-phosphate
  modified_base 19: mod_base = OTHER; note = adenosine-3'-phosphate
  modified_base 20: mod_base = OTHER; note = 2'-deoxythymidine-3'-phosphorothioate
  misc_feature 1..19: note = RNA
  misc_feature 20..21: note = DNA
tgaaaggactcacttggtatt

SEQ ID NO: 724 - DNA, 21 bp, synthetic construct
  source 1..21: mol_type = other DNA
  modified_base 1: mod_base = OTHER; note = 2'-O-methyluridine-3'-phosphate
  modified_base 2: mod_base = OTHER; note = adenosine-3'-phosphate
  modified_base 3: mod_base = OTHER; note = cytidine-3'-phosphate
  modified_base 4: mod_base = OTHER; note = 2'-O-methylcytidine-3'-phosphate
  modified_base 5: mod_base = OTHER; note = adenosine-3'-phosphate
  modified_base 6: mod_base = OTHER; note = adenosine-3'-phosphate
  modified_base 7: mod_base = OTHER; note = guanosine-3'-phosphate
  modified_base 8: mod_base = OTHER; note = uridine-3'-phosphate
  modified_base 9: mod_base = OTHER; note = guanosine-3'-phosphate
  modified_base 10: mod_base = OTHER; note = adenosine-3'-phosphate
  modified_base 11: mod_base = OTHER; note = guanosine-3'-phosphate
  modified_base 12: mod_base = OTHER; note = uridine-3'-phosphate
  modified_base 13: mod_base = OTHER; note = cytidine-3'-phosphate
  modified_base 14: mod_base = OTHER; note = cytidine-3'-phosphate
  modified_base 15: mod_base = OTHER; note = uridine-3'-phosphate
  modified_base 16: mod_base = OTHER; note = uridine-3'-phosphate
  modified_base 17: mod_base = OTHER; note = uridine-3'-phosphate
  modified_base 18: mod_base = OTHER; note = 2'-O-methylcytidine-3'-phosphate
  modified_base 19: mod_base = OTHER; note = adenosine-3'-phosphate
  modified_base 20: mod_base = OTHER; note = 2'-deoxythymidine-3'-phosphorothioate
  misc_feature 1..19: note = RNA
  misc_feature 20..21: note = DNA
taccaagtgagtcctttcatt

SEQ ID NO: 725 - DNA, 21 bp, synthetic construct
  source 1..21: mol_type = other DNA
  modified_base 1: mod_base = OTHER; note = adenosine-3'-phosphate
  modified_base 2: mod_base = OTHER; note = guanosine-3'-phosphate
  modified_base 3: mod_base = OTHER; note = guanosine-3'-phosphate
  modified_base 4: mod_base = OTHER; note = adenosine-3'-phosphate
  modified_base 5: mod_base = OTHER; note = 2'-O-methylcytidine-3'-phosphate
  modified_base 6: mod_base = OTHER; note = 2'-O-methyluridine-3'-phosphate
  modified_base 7: mod_base = OTHER; note = 2'-O-methylcytidine-3'-phosphate
  modified_base 8: mod_base = OTHER; note = adenosine-3'-phosphate
  modified_base 9: mod_base = OTHER; note = 2'-O-methylcytidine-3'-phosphate
  modified_base 10: mod_base = OTHER; note = 2'-O-methyluridine-3'-phosphate
  modified_base 11: mod_base = OTHER; note = 2'-O-methyluridine-3'-phosphate
  modified_base 12: mod_base = OTHER; note = guanosine-3'-phosphate
  modified_base 13: mod_base = OTHER; note = guanosine-3'-phosphate
  modified_base 14: mod_base = OTHER; note = 2'-O-methyluridine-3'-phosphate
  modified_base 15: mod_base = OTHER; note = adenosine-3'-phosphate
  modified_base 16: mod_base = OTHER; note = adenosine-3'-phosphate
  modified_base 17: mod_base = OTHER; note = 2'-O-methyluridine-3'-phosphate
  modified_base 18: mod_base = OTHER; note = 2'-O-methyluridine-3'-phosphate
  modified_base 19: mod_base = OTHER; note = 2'-O-methylcytidine-3'-phosphate
  modified_base 20: mod_base = OTHER; note = 2'-deoxythymidine-3'-phosphorothioate
  misc_feature 1..19: note = RNA
  misc_feature 20..21: note = DNA
aggactcacttggtaattctt

SEQ ID NO: 726 - DNA, 21 bp, synthetic construct
  source 1..21: mol_type = other DNA
  modified_base 1: mod_base = OTHER; note = guanosine-3'-phosphate
  modified_base 2: mod_base = OTHER; note = adenosine-3'-phosphate
  modified_base 3: mod_base = OTHER; note = adenosine-3'-phosphate
  modified_base 4: mod_base = OTHER; note = uridine-3'-phosphate
  modified_base 5: mod_base = OTHER; note = 2'-O-methyluridine-3'-phosphate
  modified_base 6: mod_base = OTHER; note = adenosine-3'-phosphate
  modified_base 7: mod_base = OTHER; note = cytidine-3'-phosphate
  modified_base 8: mod_base = OTHER; note = 2'-O-methylcytidine-3'-phosphate
  modified_base 9: mod_base = OTHER; note = adenosine-3'-phosphate
  modified_base 10: mod_base = OTHER; note = adenosine-3'-phosphate
  modified_base 11: mod_base = OTHER; note = guanosine-3'-phosphate
  modified_base 12: mod_base = OTHER; note = uridine-3'-phosphate
  modified_base 13: mod_base = OTHER; note = guanosine-3'-phosphate
  modified_base 14: mod_base = OTHER; note = adenosine-3'-phosphate
  modified_base 15: mod_base = OTHER; note = guanosine-3'-phosphate
  modified_base 16: mod_base = OTHER; note = uridine-3'-phosphate
  modified_base 17: mod_base = OTHER; note = cytidine-3'-phosphate
  modified_base 18: mod_base = OTHER; note = cytidine-3'-phosphate
  modified_base 19: mod_base = OTHER; note = uridine-3'-phosphate
  modified_base 20: mod_base = OTHER; note = 2'-deoxythymidine-3'-phosphorothioate
  misc_feature 1..19: note = RNA
  misc_feature 20..21: note = DNA
gaattaccaagtgagtccttt

SEQ ID NO: 727 - DNA, 21 bp, synthetic construct
  source 1..21: mol_type = other DNA
  modified_base 1: mod_base = OTHER; note = guanosine-3'-phosphate
  modified_base 2: mod_base = OTHER; note = adenosine-3'-phosphate
  modified_base 3: mod_base = OTHER; note = 2'-O-methylcytidine-3'-phosphate
  modified_base 4: mod_base = OTHER; note = 2'-O-methyluridine-3'-phosphate
  modified_base 5: mod_base = OTHER; note = 2'-O-methylcytidine-3'-phosphate
  modified_base 6: mod_base = OTHER; note = adenosine-3'-phosphate
  modified_base 7: mod_base = OTHER; note = 2'-O-methylcytidine-3'-phosphate
  modified_base 8: mod_base = OTHER; note = 2'-O-methyluridine-3'-phosphate
  modified_base 9: mod_base = OTHER; note = 2'-O-methyluridine-3'-phosphate
  modified_base 10: mod_base = OTHER; note = guanosine-3'-phosphate
  modified_base 11: mod_base = OTHER; note = guanosine-3'-phosphate
  modified_base 12: mod_base = OTHER; note = 2'-O-methyluridine-3'-phosphate
  modified_base 13: mod_base = OTHER; note = adenosine-3'-phosphate
  modified_base 14: mod_base = OTHER; note = adenosine-3'-phosphate
  modified_base 15: mod_base = OTHER; note = 2'-O-methyluridine-3'-phosphate
  modified_base 16: mod_base = OTHER; note = 2'-O-methyluridine-3'-phosphate
  modified_base 17: mod_base = OTHER; note = 2'-O-methylcytidine-3'-phosphate
  modified_base 18: mod_base = OTHER; note = 2'-O-methyluridine-3'-phosphate
  modified_base 19: mod_base = OTHER; note = guanosine-3'-phosphate
  modified_base 20: mod_base = OTHER; note = 2'-deoxythymidine-3'-phosphorothioate
  misc_feature 1..19: note = RNA
  misc_feature 20..21: note = DNA
gactcacttggtaattctgtt

SEQ ID NO: 728 - DNA, 21 bp, synthetic construct
  source 1..21: mol_type = other DNA
  modified_base 1: mod_base = OTHER; note = 2'-O-methylcytidine-3'-phosphate
  modified_base 2: mod_base = OTHER; note = adenosine-3'-phosphate
  modified_base 3: mod_base = OTHER; note = guanosine-3'-phosphate
  modified_base 4: mod_base = OTHER; note = adenosine-3'-phosphate
  modified_base 5: mod_base = OTHER; note = adenosine-3'-phosphate
  modified_base 6: mod_base = OTHER; note = uridine-3'-phosphate
  modified_base 7: mod_base = OTHER; note = 2'-O-methyluridine-3'-phosphate
  modified_base 8: mod_base = OTHER; note = adenosine-3'-phosphate
  modified_base 9: mod_base = OTHER; note = cytidine-3'-phosphate
  modified_base 10: mod_base = OTHER; note = 2'-O-methylcytidine-3'-phosphate
  modified_base 11: mod_base = OTHER; note = adenosine-3'-phosphate
  modified_base 12: mod_base = OTHER; note = adenosine-3'-phosphate
  modified_base 13: mod_base = OTHER; note = guanosine-3'-phosphate
  modified_base 14: mod_base = OTHER; note = uridine-3'-phosphate
  modified_base 15: mod_base = OTHER; note = guanosine-3'-phosphate
  modified_base 16: mod_base = OTHER; note = adenosine-3'-phosphate
  modified_base 17: mod_base = OTHER; note = guanosine-3'-phosphate
  modified_base 18: mod_base = OTHER; note = uridine-3'-phosphate
  modified_base 19: mod_base = OTHER; note = cytidine-3'-phosphate
  modified_base 20: mod_base = OTHER; note = 2'-deoxythymidine-3'-phosphorothioate
  misc_feature 1..19: note = RNA
  misc_feature 20..21: note = DNA
cagaattaccaagtgagtctt

SEQ ID NO: 729 - DNA, 21 bp, synthetic construct
  source 1..21: mol_type = other DNA
  modified_base 1: mod_base = OTHER; note = 2'-O-methyluridine-3'-phosphate
  modified_base 2: mod_base = OTHER; note = 2'-O-methylcytidine-3'-phosphate
  modified_base 3: mod_base = OTHER; note = adenosine-3'-phosphate
  modified_base 4: mod_base = OTHER; note = 2'-O-methylcytidine-3'-phosphate
  modified_base 5: mod_base = OTHER; note = 2'-O-methyluridine-3'-phosphate
  modified_base 6: mod_base = OTHER; note = 2'-O-methyluridine-3'-phosphate
  modified_base 7: mod_base = OTHER; note = guanosine-3'-phosphate
  modified_base 8: mod_base = OTHER; note = guanosine-3'-phosphate
  modified_base 9: mod_base = OTHER; note = 2'-O-methyluridine-3'-phosphate
  modified_base 10: mod_base = OTHER; note = adenosine-3'-phosphate
  modified_base 11: mod_base = OTHER; note = adenosine-3'-phosphate
  modified_base 12: mod_base = OTHER; note = 2'-O-methyluridine-3'-phosphate
  modified_base 13: mod_base = OTHER; note = 2'-O-methyluridine-3'-phosphate
  modified_base 14: mod_base = OTHER; note = 2'-O-methylcytidine-3'-phosphate
  modified_base 15: mod_base = OTHER; note = 2'-O-methyluridine-3'-phosphate
  modified_base 16: mod_base = OTHER; note = guanosine-3'-phosphate
  modified_base 17: mod_base = OTHER; note = guanosine-3'-phosphate
  modified_base 18: mod_base = OTHER; note = guanosine-3'-phosphate
  modified_base 19: mod_base = OTHER; note = adenosine-3'-phosphate
  modified_base 20: mod_base = OTHER; note = 2'-deoxythymidine-3'-phosphorothioate
  misc_feature 1..19: note = RNA
  misc_feature 20..21: note = DNA
tcacttggtaattctgggatt

SEQ ID NO: 730 - DNA, 21 bp, synthetic construct
  source 1..21: mol_type = other DNA
  modified_base 1: mod_base = OTHER; note = uridine-3'-phosphate
  modified_base 2: mod_base = OTHER; note = cytidine-3'-phosphate
  modified_base 3: mod_base = OTHER; note = cytidine-3'-phosphate
  modified_base 4: mod_base = OTHER; note = 2'-O-methylcytidine-3'-phosphate
  modified_base 5: mod_base = OTHER; note = adenosine-3'-phosphate
  modified_base 6: mod_base = OTHER; note = guanosine-3'-phosphate
  modified_base 7: mod_base = OTHER; note = adenosine-3'-phosphate
  modified_base 8: mod_base = OTHER; note = adenosine-3'-phosphate
  modified_base 9: mod_base = OTHER; note = uridine-3'-phosphate
  modified_base 10: mod_base = OTHER; note = 2'-O-methyluridine-3'-phosphate
  modified_base 11: mod_base = OTHER; note = adenosine-3'-phosphate
  modified_base 12: mod_base = OTHER; note = cytidine-3'-phosphate
  modified_base 13: mod_base = OTHER; note = 2'-O-methylcytidine-3'-phosphate
  modified_base 14: mod_base = OTHER; note = adenosine-3'-phosphate
  modified_base 15: mod_base = OTHER; note = adenosine-3'-phosphate
  modified_base 16: mod_base = OTHER; note = guanosine-3'-phosphate
  modified_base 17: mod_base = OTHER; note = uridine-3'-phosphate
  modified_base 18: mod_base = OTHER; note = guanosine-3'-phosphate
  modified_base 19: mod_base = OTHER; note = adenosine-3'-phosphate
  modified_base 20: mod_base = OTHER; note = 2'-deoxythymidine-3'-phosphorothioate
  misc_feature 1..19: note = RNA
  misc_feature 20..21: note = DNA
tcccagaattaccaagtgatt

SEQ ID NO: 731 - DNA, 21 bp, synthetic construct
  source 1..21: mol_type = other DNA
  modified_base 1: mod_base = OTHER; note = guanosine-3'-phosphate
  modified_base 2: mod_base = OTHER; note = guanosine-3'-phosphate
  modified_base 3: mod_base = OTHER; note = 2'-O-methyluridine-3'-phosphate
  modified_base 4: mod_base = OTHER; note = adenosine-3'-phosphate
  modified_base 5: mod_base = OTHER; note = adenosine-3'-phosphate
  modified_base 6: mod_base = OTHER; note = 2'-O-methyluridine-3'-phosphate
  modified_base 7: mod_base = OTHER; note = 2'-O-methyluridine-3'-phosphate
  modified_base 8: mod_base = OTHER; note = 2'-O-methylcytidine-3'-phosphate
  modified_base 9: mod_base = OTHER; note = 2'-O-methyluridine-3'-phosphate
  modified_base 10: mod_base = OTHER; note = guanosine-3'-phosphate
  modified_base 11: mod_base = OTHER; note = guanosine-3'-phosphate
  modified_base 12: mod_base = OTHER; note = guanosine-3'-phosphate
  modified_base 13: mod_base = OTHER; note = adenosine-3'-phosphate
  modified_base 14: mod_base = OTHER; note = guanosine-3'-phosphate
  modified_base 15: mod_base = OTHER; note = 2'-O-methylcytidine-3'-phosphate
  modified_base 16: mod_base = OTHER; note = 2'-O-methylcytidine-3'-phosphate
  modified_base 17: mod_base = OTHER; note = adenosine-3'-phosphate
  modified_base 18: mod_base = OTHER; note = 2'-O-methyluridine-3'-phosphate
  modified_base 19: mod_base = OTHER; note = 2'-O-methylcytidine-3'-phosphate
  modified_base 20: mod_base = OTHER; note = 2'-deoxythymidine-3'-phosphorothioate
  misc_feature 1..19: note = RNA
  misc_feature 20..21: note = DNA
ggtaattctgggagccatctt

SEQ ID NO: 732 - DNA, 21 bp, synthetic construct
  source 1..21: mol_type = other DNA
  modified_base 1: mod_base = OTHER; note = guanosine-3'-phosphate
  modified_base 2: mod_base = OTHER; note = adenosine-3'-phosphate
  modified_base 3: mod_base = OTHER; note = uridine-3'-phosphate
  modified_base 4: mod_base = OTHER; note = guanosine-3'-phosphate
  modified_base 5: mod_base = OTHER; note = guanosine-3'-phosphate
  modified_base 6: mod_base = OTHER; note = cytidine-3'-phosphate
  modified_base 7: mod_base = OTHER; note = uridine-3'-phosphate
  modified_base 8: mod_base = OTHER; note = cytidine-3'-phosphate
  modified_base 9: mod_base = OTHER; note = cytidine-3'-phosphate
  modified_base 10: mod_base = OTHER; note = 2'-O-methylcytidine-3'-phosphate
  modified_base 11: mod_base = OTHER; note = adenosine-3'-phosphate
  modified_base 12: mod_base = OTHER; note = guanosine-3'-phosphate
  modified_base 13: mod_base = OTHER; note = adenosine-3'-phosphate
  modified_base 14: mod_base = OTHER; note = adenosine-3'-phosphate
  modified_base 15: mod_base = OTHER; note = uridine-3'-phosphate
  modified_base 16: mod_base = OTHER; note = 2'-O-methyluridine-3'-phosphate
  modified_base 17: mod_base = OTHER; note = adenosine-3'-phosphate
  modified_base 18: mod_base = OTHER; note = cytidine-3'-phosphate
  modified_base 19: mod_base = OTHER; note = cytidine-3'-phosphate
  modified_base 20: mod_base = OTHER; note = 2'-deoxythymidine-3'-phosphorothioate
  misc_feature 1..19: note = RNA
  misc_feature 20..21: note = DNA
gatggctcccagaattacctt

SEQ ID NO: 733 - DNA, 21 bp, synthetic construct
  source 1..21: mol_type = other DNA
  modified_base 1: mod_base = OTHER; note = guanosine-3'-phosphate
  modified_base 2: mod_base = OTHER; note = 2'-O-methyluridine-3'-phosphate
  modified_base 3: mod_base = OTHER; note = adenosine-3'-phosphate
  modified_base 4: mod_base = OTHER; note = adenosine-3'-phosphate
  modified_base 5: mod_base = OTHER; note = 2'-O-methyluridine-3'-phosphate
  modified_base 6: mod_base = OTHER; note = 2'-O-methyluridine-3'-phosphate
  modified_base 7: mod_base = OTHER; note = 2'-O-methylcytidine-3'-phosphate
  modified_base 8: mod_base = OTHER; note = 2'-O-methyluridine-3'-phosphate
  modified_base 9: mod_base = OTHER; note = guanosine-3'-phosphate
  modified_base 10: mod_base = OTHER; note = guanosine-3'-phosphate
  modified_base 11: mod_base = OTHER; note = guanosine-3'-phosphate
  modified_base 12: mod_base = OTHER; note = adenosine-3'-phosphate
  modified_base 13: mod_base = OTHER; note = guanosine-3'-phosphate
  modified_base 14: mod_base = OTHER; note = 2'-O-methylcytidine-3'-phosphate
  modified_base 15: mod_base = OTHER; note = 2'-O-methylcytidine-3'-phosphate
  modified_base 16: mod_base = OTHER; note = adenosine-3'-phosphate
  modified_base 17: mod_base = OTHER; note = 2'-O-methyluridine-3'-phosphate
  modified_base 18: mod_base = OTHER; note = 2'-O-methylcytidine-3'-phosphate
  modified_base 19: mod_base = OTHER; note = 2'-O-methyluridine-3'-phosphate
  modified_base 20: mod_base = OTHER; note = 2'-deoxythymidine-3'-phosphorothioate
  misc_feature 1..19: note = RNA
  misc_feature 20..21: note = DNA
gtaattctgggagccatcttt

SEQ ID NO: 734 - DNA, 21 bp, synthetic construct
  source 1..21: mol_type = other DNA
  modified_base 1: mod_base = OTHER; note = adenosine-3'-phosphate
  modified_base 2: mod_base = OTHER; note = guanosine-3'-phosphate
  modified_base 3: mod_base = OTHER; note = adenosine-3'-phosphate
  modified_base 4: mod_base = OTHER; note = uridine-3'-phosphate
  modified_base 5: mod_base = OTHER; note = guanosine-3'-phosphate
  modified_base 6: mod_base = OTHER; note = guanosine-3'-phosphate
  modified_base 7: mod_base = OTHER; note = cytidine-3'-phosphate
  modified_base 8: mod_base = OTHER; note = uridine-3'-phosphate
  modified_base 9: mod_base = OTHER; note = cytidine-3'-phosphate
  modified_base 10: mod_base = OTHER; note = cytidine-3'-phosphate
  modified_base 11: mod_base = OTHER; note = 2'-O-methylcytidine-3'-phosphate
  modified_base 12: mod_base = OTHER; note = adenosine-3'-phosphate
  modified_base 13: mod_base = OTHER; note = guanosine-3'-phosphate
  modified_base 14: mod_base = OTHER; note = adenosine-3'-phosphate
  modified_base 15: mod_base = OTHER; note = adenosine-3'-phosphate
  modified_base 16: mod_base = OTHER; note = uridine-3'-phosphate
  modified_base 17: mod_base = OTHER; note = 2'-O-methyluridine-3'-phosphate
  modified_base 18: mod_base = OTHER; note = adenosine-3'-phosphate
  modified_base 19: mod_base = OTHER; note = cytidine-3'-phosphate
  modified_base 20: mod_base = OTHER; note = 2'-deoxythymidine-3'-phosphorothioate
  misc_feature 1..19: note = RNA
  misc_feature 20..21: note = DNA
agatggctcccagaattactt

SEQ ID NO: 735 - DNA, 21 bp, synthetic construct
  source 1..21: mol_type = other DNA
  modified_base 1: mod_base = OTHER; note = 2'-O-methyluridine-3'-phosphate
  modified_base 2: mod_base = OTHER; note = 2'-O-methylcytidine-3'-phosphate
  modified_base 3: mod_base = OTHER; note = 2'-O-methyluridine-3'-phosphate
  modified_base 4: mod_base = OTHER; note = guanosine-3'-phosphate
  modified_base 5: mod_base = OTHER; note = guanosine-3'-phosphate
  modified_base 6: mod_base = OTHER; note = guanosine-3'-phosphate
  modified_base 7: mod_base = OTHER; note = adenosine-3'-phosphate
  modified_base 8: mod_base = OTHER; note = guanosine-3'-phosphate
  modified_base 9: mod_base = OTHER; note = 2'-O-methylcytidine-3'-phosphate
  modified_base 10: mod_base = OTHER; note = 2'-O-methylcytidine-3'-phosphate
  modified_base 11: mod_base = OTHER; note = adenosine-3'-phosphate
  modified_base 12: mod_base = OTHER; note = 2'-O-methyluridine-3'-phosphate
  modified_base 13: mod_base = OTHER; note = 2'-O-methylcytidine-3'-phosphate
  modified_base 14: mod_base = OTHER; note = 2'-O-methyluridine-3'-phosphate
  modified_base 15: mod_base = OTHER; note = 2'-O-methyluridine-3'-phosphate
  modified_base 16: mod_base = OTHER; note = adenosine-3'-phosphate
  modified_base 17: mod_base = OTHER; note = 2'-O-methyluridine-3'-phosphate
  modified_base 18: mod_base = OTHER; note = 2'-O-methyluridine-3'-phosphate
  modified_base 19: mod_base = OTHER; note = adenosine-3'-phosphate
  modified_base 20: mod_base = OTHER; note = 2'-deoxythymidine-3'-phosphorothioate
  misc_feature 1..19: note = RNA
  misc_feature 20..21: note = DNA
tctgggagccatcttattatt

SEQ ID NO: 736 - DNA, 21 bp, synthetic construct
  source 1..21: mol_type = other DNA
  modified_base 1: mod_base = OTHER; note = 2'-O-methyluridine-3'-phosphate
  modified_base 2: mod_base = OTHER; note = adenosine-3'-phosphate
  modified_base 3: mod_base = OTHER; note = adenosine-3'-phosphate
  modified_base 4: mod_base = OTHER; note = 2'-O-methyluridine-3'-phosphate
  modified_base 5: mod_base = OTHER; note = adenosine-3'-phosphate
  modified_base 6: mod_base = OTHER; note = adenosine-3'-phosphate
  modified_base 7: mod_base = OTHER; note = guanosine-3'-phosphate
  modified_base 8: mod_base = OTHER; note = adenosine-3'-phosphate
  modified_base 9: mod_base = OTHER; note = uridine-3'-phosphate
  modified_base 10: mod_base = OTHER; note = guanosine-3'-phosphate
  modified_base 11: mod_base = OTHER; note = guanosine-3'-phosphate
  modified_base 12: mod_base = OTHER; note = cytidine-3'-phosphate
  modified_base 13: mod_base = OTHER; note = uridine-3'-phosphate
  modified_base 14: mod_base = OTHER; note = cytidine-3'-phosphate
  modified_base 15: mod_base = OTHER; note = cytidine-3'-phosphate
  modified_base 16: mod_base = OTHER; note = 2'-O-methylcytidine-3'-phosphate
  modified_base 17: mod_base = OTHER; note = adenosine-3'-phosphate
  modified_base 18: mod_base = OTHER; note = guanosine-3'-phosphate
  modified_base 19: mod_base = OTHER; note = adenosine-3'-phosphate
  modified_base 20: mod_base = OTHER; note = 2'-deoxythymidine-3'-phosphorothioate
  misc_feature 1..19: note = RNA
  misc_feature 20..21: note = DNA
taataagatggctcccagatt

SEQ ID NO: 737 - DNA, 21 bp, synthetic construct
  source 1..21: mol_type = other DNA
  modified_base 1: mod_base = OTHER; note = 2'-O-methylcytidine-3'-phosphate
  modified_base 2: mod_base = OTHER; note = 2'-O-methyluridine-3'-phosphate
  modified_base 3: mod_base = OTHER; note = guanosine-3'-phosphate
  modified_base 4: mod_base = OTHER; note = guanosine-3'-phosphate
  modified_base 5: mod_base = OTHER; note = guanosine-3'-phosphate
  modified_base 6: mod_base = OTHER; note = adenosine-3'-phosphate
  modified_base 7: mod_base = OTHER; note = guanosine-3'-phosphate
  modified_base 8: mod_base = OTHER; note = 2'-O-methylcytidine-3'-phosphate
  modified_base 9: mod_base = OTHER; note = 2'-O-methylcytidine-3'-phosphate
  modified_base 10: mod_base = OTHER; note = adenosine-3'-phosphate
  modified_base 11: mod_base = OTHER; note = 2'-O-methyluridine-3'-phosphate
  modified_base 12: mod_base = OTHER; note = 2'-O-methylcytidine-3'-phosphate
  modified_base 13: mod_base = OTHER; note = 2'-O-methyluridine-3'-phosphate
  modified_base 14: mod_base = OTHER; note = 2'-O-methyluridine-3'-phosphate
  modified_base 15: mod_base = OTHER; note = adenosine-3'-phosphate
  modified_base 16: mod_base = OTHER; note = 2'-O-methyluridine-3'-phosphate
  modified_base 17: mod_base = OTHER; note = 2'-O-methyluridine-3'-phosphate
  modified_base 18: mod_base = OTHER; note = adenosine-3'-phosphate
  modified_base 19: mod_base = OTHER; note = 2'-O-methyluridine-3'-phosphate
  modified_base 20: mod_base = OTHER; note = 2'-deoxythymidine-3'-phosphorothioate
  misc_feature 1..19: note = RNA
  misc_feature 20..21: note = DNA
ctgggagccatcttattattt

SEQ ID NO: 738 - DNA, 21 bp, synthetic construct
  source 1..21: mol_type = other DNA
  modified_base 1: mod_base = OTHER; note = adenosine-3'-phosphate
  modified_base 2: mod_base = OTHER; note = 2'-O-methyluridine-3'-phosphate
  modified_base 3: mod_base = OTHER; note = adenosine-3'-phosphate
  modified_base 4: mod_base = OTHER; note = adenosine-3'-phosphate
  modified_base 5: mod_base = OTHER; note = 2'-O-methyluridine-3'-phosphate
  modified_base 6: mod_base = OTHER; note = adenosine-3'-phosphate
  modified_base 7: mod_base = OTHER; note = adenosine-3'-phosphate
  modified_base 8: mod_base = OTHER; note = guanosine-3'-phosphate
  modified_base 9: mod_base = OTHER; note = adenosine-3'-phosphate
  modified_base 10: mod_base = OTHER; note = uridine-3'-phosphate
  modified_base 11: mod_base = OTHER; note = guanosine-3'-phosphate
  modified_base 12: mod_base = OTHER; note = guanosine-3'-phosphate
  modified_base 13: mod_base = OTHER; note = cytidine-3'-phosphate
  modified_base 14: mod_base = OTHER; note = uridine-3'-phosphate
  modified_base 15: mod_base = OTHER; note = cytidine-3'-phosphate
  modified_base 16: mod_base = OTHER; note = cytidine-3'-phosphate
  modified_base 17: mod_base = OTHER; note = 2'-O-methylcytidine-3'-phosphate
  modified_base 18: mod_base = OTHER; note = adenosine-3'-phosphate
  modified_base 19: mod_base = OTHER; note = guanosine-3'-phosphate
  modified_base 20: mod_base = OTHER; note = 2'-deoxythymidine-3'-phosphorothioate
  misc_feature 1..19: note = RNA
  misc_feature 20..21: note = DNA
ataataagatggctcccagtt

SEQ ID NO: 739 - DNA, 21 bp, synthetic construct
  source 1..21: mol_type = other DNA
  modified_base 1: mod_base = OTHER; note = 2'-O-methyluridine-3'-phosphate
  modified_base 2: mod_base = OTHER; note = guanosine-3'-phosphate
  modified_base 3: mod_base = OTHER; note = guanosine-3'-phosphate
  modified_base 4: mod_base = OTHER; note = guanosine-3'-phosphate
  modified_base 5: mod_base = OTHER; note = adenosine-3'-phosphate
  modified_base 6: mod_base = OTHER; note = guanosine-3'-phosphate
  modified_base 7: mod_base = OTHER; note = 2'-O-methylcytidine-3'-phosphate
  modified_base 8: mod_base = OTHER; note = 2'-O-methylcytidine-3'-phosphate
  modified_base 9: mod_base = OTHER; note = adenosine-3'-phosphate
  modified_base 10: mod_base = OTHER; note = 2'-O-methyluridine-3'-phosphate
  modified_base 11: mod_base = OTHER; note = 2'-O-methylcytidine-3'-phosphate
  modified_base 12: mod_base = OTHER; note = 2'-O-methyluridine-3'-phosphate
  modified_base 13: mod_base = OTHER; note = 2'-O-methyluridine-3'-phosphate
  modified_base 14: mod_base = OTHER; note = adenosine-3'-phosphate
  modified_base 15: mod_base = OTHER; note = 2'-O-methyluridine-3'-phosphate
  modified_base 16: mod_base = OTHER; note = 2'-O-methyluridine-3'-phosphate
  modified_base 17: mod_base = OTHER; note = adenosine-3'-phosphate
  modified_base 18: mod_base = OTHER; note = 2'-O-methyluridine-3'-phosphate
  modified_base 19: mod_base = OTHER; note = guanosine-3'-phosphate
  modified_base 20: mod_base = OTHER; note = 2'-deoxythymidine-3'-phosphorothioate
  misc_feature 1..19: note = RNA
  misc_feature 20..21: note = DNA
tgggagccatcttattatgtt

SEQ ID NO: 740 - DNA, 21 bp, synthetic construct
  source 1..21: mol_type = other DNA
  modified_base 1: mod_base = OTHER; note = 2'-O-methylcytidine-3'-phosphate
  modified_base 2: mod_base = OTHER; note = adenosine-3'-phosphate
  modified_base 3: mod_base = OTHER; note = 2'-O-methyluridine-3'-phosphate
  modified_base 4: mod_base = OTHER; note = adenosine-3'-phosphate
  modified_base 5: mod_base = OTHER; note = adenosine-3'-phosphate
  modified_base 6: mod_base = OTHER; note = 2'-O-methyluridine-3'-phosphate
  modified_base 7: mod_base = OTHER; note = adenosine-3'-phosphate
  modified_base 8: mod_base = OTHER; note = adenosine-3'-phosphate
  modified_base 9: mod_base = OTHER; note = guanosine-3'-phosphate
  modified_base 10: mod_base = OTHER; note = adenosine-3'-phosphate
  modified_base 11: mod_base = OTHER; note = uridine-3'-phosphate
  modified_base 12: mod_base = OTHER; note = guanosine-3'-phosphate
  modified_base 13: mod_base = OTHER; note = guanosine-3'-phosphate
  modified_base 14: mod_base = OTHER; note = cytidine-3'-phosphate
  modified_base 15: mod_base = OTHER; note = uridine-3'-phosphate
  modified_base 16: mod_base = OTHER; note = cytidine-3'-phosphate
  modified_base 17: mod_base = OTHER; note = cytidine-3'-phosphate
  modified_base 18: mod_base = OTHER; note = 2'-O-methylcytidine-3'-phosphate
  modified_base 19: mod_base = OTHER; note = adenosine-3'-phosphate
  modified_base 20: mod_base = OTHER; note = 2'-deoxythymidine-3'-phosphorothioate
  misc_feature 1..19: note = RNA
  misc_feature 20..21: note = DNA
cataataagatggctcccatt

SEQ ID NO: 741 - DNA, 21 bp, synthetic construct
  source 1..21: mol_type = other DNA
  modified_base 1: mod_base = OTHER; note = guanosine-3'-phosphate
  modified_base 2: mod_base = OTHER; note = guanosine-3'-phosphate
  modified_base 3: mod_base = OTHER; note = guanosine-3'-phosphate
  modified_base 4: mod_base = OTHER; note = adenosine-3'-phosphate
  modified_base 5: mod_base = OTHER; note = guanosine-3'-phosphate
  modified_base 6: mod_base = OTHER; note = 2'-O-methylcytidine-3'-phosphate
  modified_base 7: mod_base = OTHER; note = 2'-O-methylcytidine-3'-phosphate
  modified_base 8: mod_base = OTHER; note = adenosine-3'-phosphate
  modified_base 9: mod_base = OTHER; note = 2'-O-methyluridine-3'-phosphate
  modified_base 10: mod_base = OTHER; note = 2'-O-methylcytidine-3'-phosphate
  modified_base 11: mod_base = OTHER; note = 2'-O-methyluridine-3'-phosphate
  modified_base 12: mod_base = OTHER; note = 2'-O-methyluridine-3'-phosphate
  modified_base 13: mod_base = OTHER; note = adenosine-3'-phosphate
  modified_base 14: mod_base = OTHER; note = 2'-O-methyluridine-3'-phosphate
  modified_base 15: mod_base = OTHER; note = 2'-O-methyluridine-3'-phosphate
  modified_base 16: mod_base = OTHER; note = adenosine-3'-phosphate
  modified_base 17: mod_base = OTHER; note = 2'-O-methyluridine-3'-phosphate
  modified_base 18: mod_base = OTHER; note = guanosine-3'-phosphate
  modified_base 19: mod_base = OTHER; note = 2'-O-methylcytidine-3'-phosphate
  modified_base 20: mod_base = OTHER; note = 2'-deoxythymidine-3'-phosphorothioate
  misc_feature 1..19: note = RNA
  misc_feature 20..21: note = DNA
gggagccatcttattatgctt

SEQ ID NO: 742 - DNA, 21 bp, synthetic construct
  source 1..21: mol_type = other DNA
  modified_base 1: mod_base = OTHER; note = guanosine-3'-phosphate
  modified_base 2: mod_base = OTHER; note = 2'-O-methylcytidine-3'-phosphate
  modified_base 3: mod_base = OTHER; note = adenosine-3'-phosphate
  modified_base 4: mod_base = OTHER; note = 2'-O-methyluridine-3'-phosphate
  modified_base 5: mod_base = OTHER; note = adenosine-3'-phosphate
  modified_base 6: mod_base = OTHER; note = adenosine-3'-phosphate
  modified_base 7: mod_base = OTHER; note = 2'-O-methyluridine-3'-phosphate
  modified_base 8: mod_base = OTHER; note = adenosine-3'-phosphate
  modified_base 9: mod_base = OTHER; note = adenosine-3'-phosphate
  modified_base 10: mod_base = OTHER; note = guanosine-3'-phosphate
  modified_base 11: mod_base = OTHER; note = adenosine-3'-phosphate
  modified_base 12: mod_base = OTHER; note = uridine-3'-phosphate
  modified_base 13: mod_base = OTHER; note = guanosine-3'-phosphate
  modified_base 14: mod_base = OTHER; note = guanosine-3'-phosphate
  modified_base 15: mod_base = OTHER; note = cytidine-3'-phosphate
  modified_base 16: mod_base = OTHER; note = uridine-3'-phosphate
  modified_base 17: mod_base = OTHER; note = cytidine-3'-phosphate
  modified_base 18: mod_base = OTHER; note = cytidine-3'-phosphate
  modified_base 19: mod_base = OTHER; note = cytidine-3'-phosphate
  modified_base 20: mod_base = OTHER; note = 2'-deoxythymidine-3'-phosphorothioate
  misc_feature 1..19: note = RNA
  misc_feature 20..21: note = DNA
gcataataagatggctccctt

SEQ ID NO: 743 - DNA, 21 bp, synthetic construct
  source 1..21: mol_type = other DNA
  modified_base 1: mod_base = OTHER; note = adenosine-3'-phosphate
  modified_base 2: mod_base = OTHER; note = guanosine-3'-phosphate
  modified_base 3: mod_base = OTHER; note = 2'-O-methylcytidine-3'-phosphate
  modified_base 4: mod_base = OTHER; note = 2'-O-methylcytidine-3'-phosphate
  modified_base 5: mod_base = OTHER; note = adenosine-3'-phosphate
  modified_base 6: mod_base = OTHER; note = 2'-O-methyluridine-3'-phosphate
  modified_base 7: mod_base = OTHER; note = 2'-O-methylcytidine-3'-phosphate
  modified_base 8: mod_base = OTHER; note = 2'-O-methyluridine-3'-phosphate
  modified_base 9: mod_base = OTHER; note = 2'-O-methyluridine-3'-phosphate
  modified_base 10: mod_base = OTHER; note = adenosine-3'-phosphate
  modified_base 11: mod_base = OTHER; note = 2'-O-methyluridine-3'-phosphate
  modified_base 12: mod_base = OTHER; note = 2'-O-methyluridine-3'-phosphate
  modified_base 13: mod_base = OTHER; note = adenosine-3'-phosphate
  modified_base 14: mod_base = OTHER; note = 2'-O-methyluridine-3'-phosphate
  modified_base 15: mod_base = OTHER; note = guanosine-3'-phosphate
  modified_base 16: mod_base = OTHER; note = 2'-O-methylcytidine-3'-phosphate
  modified_base 17: mod_base = OTHER; note = 2'-O-methylcytidine-3'-phosphate
  modified_base 18: mod_base = OTHER; note = 2'-O-methyluridine-3'-phosphate
  modified_base 19: mod_base = OTHER; note = 2'-O-methyluridine-3'-phosphate
  modified_base 20: mod_base = OTHER; note = 2'-deoxythymidine-3'-phosphorothioate
  misc_feature 1..19: note = RNA
  misc_feature 20..21: note = DNA
agccatcttattatgcctttt

SEQ ID NO: 744 - DNA, 21 bp, synthetic construct
  source 1..21: mol_type = other DNA
  modified_base 1: mod_base = OTHER; note = adenosine-3'-phosphate
  modified_base 2: mod_base = OTHER; note = adenosine-3'-phosphate
  modified_base 3: mod_base = OTHER; note = guanosine-3'-phosphate
  modified_base 4: mod_base = OTHER; note = guanosine-3'-phosphate
  modified_base 5: mod_base = OTHER; note = 2'-O-methylcytidine-3'-phosphate
  modified_base 6: mod_base = OTHER; note = adenosine-3'-phosphate
  modified_base 7: mod_base = OTHER; note = 2'-O-methyluridine-3'-phosphate
  modified_base 8: mod_base = OTHER; note = adenosine-3'-phosphate
  modified_base 9: mod_base = OTHER; note = adenosine-3'-phosphate
  modified_base 10: mod_base = OTHER; note = 2'-O-methyluridine-3'-phosphate
  modified_base 11: mod_base = OTHER; note = adenosine-3'-phosphate
  modified_base 12: mod_base = OTHER; note = adenosine-3'-phosphate
  modified_base 13: mod_base = OTHER; note = guanosine-3'-phosphate
  modified_base 14: mod_base = OTHER; note = adenosine-3'-phosphate
  modified_base 15: mod_base = OTHER; note = uridine-3'-phosphate
  modified_base 16: mod_base = OTHER; note = guanosine-3'-phosphate
  modified_base 17: mod_base = OTHER; note = guanosine-3'-phosphate
  modified_base 18: mod_base = OTHER; note = cytidine-3'-phosphate
  modified_base 19: mod_base = OTHER; note = uridine-3'-phosphate
  modified_base 20: mod_base = OTHER; note = 2'-deoxythymidine-3'-phosphorothioate
  misc_feature 1..19: note = RNA
  misc_feature 20..21: note = DNA
aaggcataataagatggcttt

SEQ ID NO: 745 - DNA, 21 bp, synthetic construct
  source 1..21: mol_type = other DNA
  modified_base 1: mod_base = OTHER; note = adenosine-3'-phosphate
  modified_base 2: mod_base = OTHER; note = 2'-O-methyluridine-3'-phosphate
  modified_base 3: mod_base = OTHER; note = 2'-O-methylcytidine-3'-phosphate
  modified_base 4: mod_base = OTHER; note = 2'-O-methyluridine-3'-phosphate
  modified_base 5: mod_base = OTHER; note = 2'-O-methyluridine-3'-phosphate
  modified_base 6: mod_base = OTHER; note = adenosine-3'-phosphate
  modified_base 7: mod_base = OTHER; note = 2'-O-methyluridine-3'-phosphate
  modified_base 8: mod_base = OTHER; note = 2'-O-methyluridine-3'-phosphate
  modified_base 9: mod_base = OTHER; note = adenosine-3'-phosphate
  modified_base 10: mod_base = OTHER; note = 2'-O-methyluridine-3'-phosphate
  modified_base 11: mod_base = OTHER; note = guanosine-3'-phosphate
  modified_base 12: mod_base = OTHER; note = 2'-O-methylcytidine-3'-phosphate
  modified_base 13: mod_base = OTHER; note = 2'-O-methylcytidine-3'-phosphate
  modified_base 14: mod_base = OTHER; note = 2'-O-methyluridine-3'-phosphate
  modified_base 15: mod_base = OTHER; note = 2'-O-methyluridine-3'-phosphate
  modified_base 16: mod_base = OTHER; note = guanosine-3'-phosphate
  modified_base 17: mod_base = OTHER; note = guanosine-3'-phosphate
  modified_base 18: mod_base = OTHER; note = 2'-O-methyluridine-3'-phosphate
  modified_base 19: mod_base = OTHER; note = guanosine-3'-phosphate
  modified_base 20: mod_base = OTHER; note = 2'-deoxythymidine-3'-phosphorothioate
  misc_feature 1..19: note = RNA
  misc_feature 20..21: note = DNA
atcttattatgccttggtgtt

SEQ ID NO: 746 - DNA, 21 bp, synthetic construct
  source 1..21: mol_type = other DNA
  modified_base 1: mod_base = OTHER; note = 2'-O-methylcytidine-3'-phosphate
  modified_base 2: mod_base = OTHER; note = adenosine-3'-phosphate
  modified_base 3: mod_base = OTHER; note = cytidine-3'-phosphate
  modified_base 4: mod_base = OTHER; note = 2'-O-methylcytidine-3'-phosphate
  modified_base 5: mod_base = OTHER; note = adenosine-3'-phosphate
  modified_base 6: mod_base = OTHER; note = adenosine-3'-phosphate
  modified_base 7: mod_base = OTHER; note = guanosine-3'-phosphate
  modified_base 8: mod_base = OTHER; note = guanosine-3'-phosphate
  modified_base 9: mod_base = OTHER; note = 2'-O-methylcytidine-3'-phosphate
  modified_base 10: mod_base = OTHER; note = adenosine-3'-phosphate
  modified_base 11: mod_base = OTHER; note = 2'-O-methyluridine-3'-phosphate
  modified_base 12: mod_base = OTHER; note = adenosine-3'-phosphate
  modified_base 13: mod_base = OTHER; note = adenosine-3'-phosphate
  modified_base 14: mod_base = OTHER; note = 2'-O-methyluridine-3'-phosphate
  modified_base 15: mod_base = OTHER; note = adenosine-3'-phosphate
  modified_base 16: mod_base = OTHER; note = adenosine-3'-phosphate
  modified_base 17: mod_base = OTHER; note = guanosine-3'-phosphate
  modified_base 18: mod_base = OTHER; note = adenosine-3'-phosphate
  modified_base 19: mod_base = OTHER; note = uridine-3'-phosphate
  modified_base 20: mod_base = OTHER; note = 2'-deoxythymidine-3'-phosphorothioate
  misc_feature 1..19: note = RNA
  misc_feature 20..21: note = DNA
caccaaggcataataagattt

SEQ ID NO: 747 - DNA, 21 bp, synthetic construct
  source 1..21: mol_type = other DNA
  modified_base 1: mod_base = OTHER; note = 2'-O-methyluridine-3'-phosphate
  modified_base 2: mod_base = OTHER; note = adenosine-3'-phosphate
  modified_base 3: mod_base = OTHER; note = 2'-O-methyluridine-3'-phosphate
  modified_base 4: mod_base = OTHER; note = 2'-O-methyluridine-3'-phosphate
  modified_base 5: mod_base = OTHER; note = adenosine-3'-phosphate
  modified_base 6: mod_base = OTHER; note = 2'-O-methyluridine-3'-phosphate
  modified_base 7: mod_base = OTHER; note = guanosine-3'-phosphate
  modified_base 8: mod_base = OTHER; note = 2'-O-methylcytidine-3'-phosphate
  modified_base 9: mod_base = OTHER; note = 2'-O-methylcytidine-3'-phosphate
  modified_base 10: mod_base = OTHER; note = 2'-O-methyluridine-3'-phosphate
  modified_base 11: mod_base = OTHER; note = 2'-O-methyluridine-3'-phosphate
  modified_base 12: mod_base = OTHER; note = guanosine-3'-phosphate
  modified_base 13: mod_base = OTHER; note = guanosine-3'-phosphate
  modified_base 14: mod_base = OTHER; note = 2'-O-methyluridine-3'-phosphate
  modified_base 15: mod_base = OTHER; note = guanosine-3'-phosphate
  modified_base 16: mod_base = OTHER; note = 2'-O-methyluridine-3'-phosphate
  modified_base 17: mod_base = OTHER; note = adenosine-3'-phosphate
  modified_base 18: mod_base = OTHER; note = guanosine-3'-phosphate
  modified_base 19: mod_base = OTHER; note = 2'-O-methylcytidine-3'-phosphate
  modified_base 20: mod_base = OTHER; note = 2'-deoxythymidine-3'-phosphorothioate
  misc_feature 1..19: note = RNA
  misc_feature 20..21: note = DNA
tattatgccttggtgtagctt

SEQ ID NO: 748 - DNA, 21 bp, synthetic construct
  source 1..21: mol_type = other DNA
  modified_base 1: mod_base = OTHER; note = guanosine-3'-phosphate
  modified_base 2: mod_base = OTHER; note = cytidine-3'-phosphate
  modified_base 3: mod_base = OTHER; note = 2'-O-methyluridine-3'-phosphate
  modified_base 4: mod_base = OTHER; note = adenosine-3'-phosphate
  modified_base 5: mod_base = OTHER; note = 2'-O-methylcytidine-3'-phosphate
  modified_base 6: mod_base = OTHER; note = adenosine-3'-phosphate
  modified_base 7: mod_base = OTHER; note = cytidine-3'-phosphate
  modified_base 8: mod_base = OTHER; note = 2'-O-methylcytidine-3'-phosphate
  modified_base 9: mod_base = OTHER; note = adenosine-3'-phosphate
  modified_base 10: mod_base = OTHER; note = adenosine-3'-phosphate
  modified_base 11: mod_base = OTHER; note = guanosine-3'-phosphate
  modified_base 12: mod_base = OTHER; note = guanosine-3'-phosphate
  modified_base 13: mod_base = OTHER; note = 2'-O-methylcytidine-3'-phosphate
  modified_base 14: mod_base = OTHER; note = adenosine-3'-phosphate
  modified_base 15: mod_base = OTHER; note = 2'-O-methyluridine-3'-phosphate
  modified_base 16: mod_base = OTHER; note = adenosine-3'-phosphate
  modified_base 17: mod_base = OTHER; note = adenosine-3'-phosphate
  modified_base 18: mod_base = OTHER; note = 2'-O-methyluridine-3'-phosphate
  modified_base 19: mod_base = OTHER; note = adenosine-3'-phosphate
  modified_base 20: mod_base = OTHER; note = 2'-deoxythymidine-3'-phosphorothioate
  misc_feature 1..19: note = RNA
  misc_feature 20..21: note = DNA
gctacaccaaggcataatatt

SEQ ID NO: 749 - DNA, 21 bp, synthetic construct
  source 1..21: mol_type = other DNA
  modified_base 1: mod_base = OTHER; note = adenosine-3'-phosphate
  modified_base 2: mod_base = OTHER; note = 2'-O-methyluridine-3'-phosphate
  modified_base 3: mod_base = OTHER; note = 2'-O-methyluridine-3'-phosphate
  modified_base 4: mod_base = OTHER; note = adenosine-3'-phosphate
  modified_base 5: mod_base = OTHER; note = 2'-O-methyluridine-3'-phosphate
  modified_base 6: mod_base = OTHER; note = guanosine-3'-phosphate
  modified_base 7: mod_base = OTHER; note = 2'-O-methylcytidine-3'-phosphate
  modified_base 8: mod_base = OTHER; note = 2'-O-methylcytidine-3'-phosphate
  modified_base 9: mod_base = OTHER; note = 2'-O-methyluridine-3'-phosphate
  modified_base 10: mod_base = OTHER; note = 2'-O-methyluridine-3'-phosphate
  modified_base 11: mod_base = OTHER; note = guanosine-3'-phosphate
  modified_base 12: mod_base = OTHER; note = guanosine-3'-phosphate
  modified_base 13: mod_base = OTHER; note = 2'-O-methyluridine-3'-phosphate
  modified_base 14: mod_base = OTHER; note = guanosine-3'-phosphate
  modified_base 15: mod_base = OTHER; note = 2'-O-methyluridine-3'-phosphate
  modified_base 16: mod_base = OTHER; note = adenosine-3'-phosphate
  modified_base 17: mod_base = OTHER; note = guanosine-3'-phosphate
  modified_base 18: mod_base = OTHER; note = 2'-O-methylcytidine-3'-phosphate
  modified_base 19: mod_base = OTHER; note = adenosine-3'-phosphate
  modified_base 20: mod_base = OTHER; note = 2'-deoxythymidine-3'-phosphorothioate
  misc_feature 1..19: note = RNA
  misc_feature 20..21: note = DNA
attatgccttggtgtagcatt

SEQ ID NO: 750 - DNA, 21 bp, synthetic construct
  source 1..21: mol_type = other DNA
  modified_base 1: mod_base = OTHER; note = uridine-3'-phosphate
  modified_base 2: mod_base = OTHER; note = guanosine-3'-phosphate
  modified_base 3: mod_base = OTHER; note = cytidine-3'-phosphate
  modified_base 4: mod_base = OTHER; note = 2'-O-methyluridine-3'-phosphate
  modified_base 5: mod_base = OTHER; note = adenosine-3'-phosphate
  modified_base 6: mod_base = OTHER; note = 2'-O-methylcytidine-3'-phosphate
  modified_base 7: mod_base = OTHER; note = adenosine-3'-phosphate
  modified_base 8: mod_base = OTHER; note = cytidine-3'-phosphate
  modified_base 9: mod_base = OTHER; note = 2'-O-methylcytidine-3'-phosphate
  modified_base 10: mod_base = OTHER; note = adenosine-3'-phosphate
  modified_base 11: mod_base = OTHER; note = adenosine-3'-phosphate
  modified_base 12: mod_base = OTHER; note = guanosine-3'-phosphate
  modified_base 13: mod_base = OTHER; note = guanosine-3'-phosphate
  modified_base 14: mod_base = OTHER; note = 2'-O-methylcytidine-3'-phosphate
  modified_base 15: mod_base = OTHER; note = adenosine-3'-phosphate
  modified_base 16: mod_base = OTHER; note = 2'-O-methyluridine-3'-phosphate
  modified_base 17: mod_base = OTHER; note = adenosine-3'-phosphate
  modified_base 18: mod_base = OTHER; note = adenosine-3'-phosphate
  modified_base 19: mod_base = OTHER; note = uridine-3'-phosphate
  modified_base 20: mod_base = OTHER; note = 2'-deoxythymidine-3'-phosphorothioate
  misc_feature 1..19: note = RNA
  misc_feature 20..21: note = DNA
tgctacaccaaggcataattt

SEQ ID NO: 751 - DNA, 21 bp, synthetic construct
  source 1..21: mol_type = other DNA
  modified_base 1: mod_base = OTHER; note = 2'-O-methyluridine-3'-phosphate
  modified_base 2: mod_base = OTHER; note = guanosine-3'-phosphate
  modified_base 3: mod_base = OTHER; note = 2'-O-methylcytidine-3'-phosphate
  modified_base 4: mod_base = OTHER; note = 2'-O-methylcytidine-3'-phosphate
  modified_base 5: mod_base = OTHER; note = 2'-O-methyluridine-3'-phosphate
  modified_base 6: mod_base = OTHER; note = 2'-O-methyluridine-3'-phosphate
  modified_base 7: mod_base = OTHER; note = guanosine-3'-phosphate
  modified_base 8: mod_base = OTHER; note = guanosine-3'-phosphate
  modified_base 9: mod_base = OTHER; note = 2'-O-methyluridine-3'-phosphate
  modified_base 10: mod_base = OTHER; note = guanosine-3'-phosphate
  modified_base 11: mod_base = OTHER; note = 2'-O-methyluridine-3'-phosphate
  modified_base 12: mod_base = OTHER; note = adenosine-3'-phosphate
  modified_base 13: mod_base = OTHER; note = guanosine-3'-phosphate
  modified_base 14: mod_base = OTHER; note = 2'-O-methylcytidine-3'-phosphate
  modified_base 15: mod_base = OTHER; note = adenosine-3'-phosphate
  modified_base 16: mod_base = OTHER; note = 2'-O-methylcytidine-3'-phosphate
  modified_base 17: mod_base = OTHER; note = 2'-O-methyluridine-3'-phosphate
  modified_base 18: mod_base = OTHER; note = guanosine-3'-phosphate
  modified_base 19: mod_base = OTHER; note = adenosine-3'-phosphate
  modified_base 20: mod_base = OTHER; note = 2'-deoxythymidine-3'-phosphorothioate
  misc_feature 1..19: note = RNA
  misc_feature 20..21: note = DNA
tgccttggtgtagcactgatt

SEQ ID NO: 752 - DNA, 21 bp, synthetic construct
  source 1..21: mol_type = other DNA
  modified_base 1: mod_base = OTHER; note = uridine-3'-phosphate
  modified_base 2: mod_base = OTHER; note = 2'-O-methylcytidine-3'-phosphate
  modified_base 3: mod_base = OTHER; note = adenosine-3'-phosphate
  modified_base 4: mod_base = OTHER; note = guanosine-3'-phosphate
  modified_base 5: mod_base = OTHER; note = uridine-3'-phosphate
  modified_base 6: mod_base = OTHER; note = guanosine-3'-phosphate
  modified_base 7: mod_base = OTHER; note = cytidine-3'-phosphate
  modified_base 8: mod_base = OTHER; note = 2'-O-methyluridine-3'-phosphate
  modified_base 9: mod_base = OTHER; note = adenosine-3'-phosphate
  modified_base 10: mod_base = OTHER; note = 2'-O-methylcytidine-3'-phosphate
  modified_base 11: mod_base = OTHER; note = adenosine-3'-phosphate
  modified_base 12: mod_base = OTHER; note = cytidine-3'-phosphate
  modified_base 13: mod_base = OTHER; note = 2'-O-methylcytidine-3'-phosphate
  modified_base 14: mod_base = OTHER; note = adenosine-3'-phosphate
  modified_base 15: mod_base = OTHER; note = adenosine-3'-phosphate
  modified_base 16: mod_base = OTHER; note = guanosine-3'-phosphate
  modified_base 17: mod_base = OTHER; note = guanosine-3'-phosphate
  modified_base 18: mod_base = OTHER; note = 2'-O-methylcytidine-3'-phosphate
  modified_base 19: mod_base = OTHER; note = adenosine-3'-phosphate
  modified_base 20: mod_base = OTHER; note = 2'-deoxythymidine-3'-phosphorothioate
  misc_feature 1..19: note = RNA
  misc_feature 20..21: note = DNA
tcagtgctacaccaaggcatt

SEQ ID NO: 753 - DNA, 21 bp, synthetic construct
  source 1..21: mol_type = other DNA
  modified_base 1: mod_base = OTHER; note = 2'-O-methyluridine-3'-phosphate
  modified_base 2: mod_base = OTHER; note = guanosine-3'-phosphate
  modified_base 3: mod_base = OTHER; note = guanosine-3'-phosphate
  modified_base 4: mod_base = OTHER; note = 2'-O-methyluridine-3'-phosphate
  modified_base 5: mod_base = OTHER; note = guanosine-3'-phosphate
  modified_base 6: mod_base = OTHER; note = 2'-O-methyluridine-3'-phosphate
  modified_base 7: mod_base = OTHER; note = adenosine-3'-phosphate
  modified_base 8: mod_base = OTHER; note = guanosine-3'-phosphate
  modified_base 9: mod_base = OTHER; note = 2'-O-methylcytidine-3'-phosphate
  modified_base 10: mod_base = OTHER; note = adenosine-3'-phosphate
  modified_base 11: mod_base = OTHER; note = 2'-O-methylcytidine-3'-phosphate
  modified_base 12: mod_base = OTHER; note = 2'-O-methyluridine-3'-phosphate
  modified_base 13: mod_base = OTHER; note = guanosine-3'-phosphate
  modified_base 14: mod_base = OTHER; note = adenosine-3'-phosphate
  modified_base 15: mod_base = OTHER; note = 2'-O-methylcytidine-3'-phosphate
  modified_base 16: mod_base = OTHER; note = adenosine-3'-phosphate
  modified_base 17: mod_base = OTHER; note = 2'-O-methyluridine-3'-phosphate
  modified_base 18: mod_base = OTHER; note = 2'-O-methyluridine-3'-phosphate
  modified_base 19: mod_base = OTHER; note = 2'-O-methylcytidine-3'-phosphate
  modified_base 20: mod_base = OTHER; note = 2'-deoxythymidine-3'-phosphorothioate
  misc_feature 1..19: note = RNA
  misc_feature 20..21: note = DNA
tggtgtagcactgacattctt

SEQ ID NO: 754 - DNA, 21 bp, synthetic construct
  source 1..21: mol_type = other DNA
  modified_base 1: mod_base = OTHER; note = guanosine-3'-phosphate
  modified_base 2: mod_base = OTHER; note = adenosine-3'-phosphate
  modified_base 3: mod_base = OTHER; note = adenosine-3'-phosphate
  modified_base 4: mod_base = OTHER; note = uridine-3'-phosphate
  modified_base 5: mod_base = OTHER; note = guanosine-3'-phosphate
  modified_base 6: mod_base = OTHER; note = uridine-3'-phosphate
  modified_base 7: mod_base = OTHER; note = 2'-O-methylcytidine-3'-phosphate
  modified_base 8: mod_base = OTHER; note = adenosine-3'-phosphate
  modified_base 9: mod_base = OTHER; note = guanosine-3'-phosphate
  modified_base 10: mod_base = OTHER; note = uridine-3'-phosphate
  modified_base 11: mod_base = OTHER; note = guanosine-3'-phosphate
  modified_base 12: mod_base = OTHER; note = cytidine-3'-phosphate
  modified_base 13: mod_base = OTHER; note = 2'-O-methyluridine-3'-phosphate
  modified_base 14: mod_base = OTHER; note = adenosine-3'-phosphate
  modified_base 15: mod_base = OTHER; note = 2'-O-methylcytidine-3'-phosphate
  modified_base 16: mod_base = OTHER; note = adenosine-3'-phosphate
  modified_base 17: mod_base = OTHER; note = cytidine-3'-phosphate
  modified_base 18: mod_base = OTHER; note = 2'-O-methylcytidine-3'-phosphate
  modified_base 19: mod_base = OTHER; note = adenosine-3'-phosphate
  modified_base 20: mod_base = OTHER; note = 2'-deoxythymidine-3'-phosphorothioate
  misc_feature 1..19: note = RNA
  misc_feature 20..21: note = DNA
gaatgtcagtgctacaccatt

SEQ ID NO: 755 - DNA, 21 bp, synthetic construct
  source 1..21: mol_type = other DNA
  modified_base 1: mod_base = OTHER; note = guanosine-3'-phosphate
  modified_base 2: mod_base = OTHER; note = 2'-O-methyluridine-3'-phosphate
  modified_base 3: mod_base = OTHER; note = adenosine-3'-phosphate
  modified_base 4: mod_base = OTHER; note = guanosine-3'-phosphate
  modified_base 5: mod_base = OTHER; note = 2'-O-methylcytidine-3'-phosphate
  modified_base 6: mod_base = OTHER; note = adenosine-3'-phosphate
  modified_base 7: mod_base = OTHER; note = 2'-O-methylcytidine-3'-phosphate
  modified_base 8: mod_base = OTHER; note = 2'-O-methyluridine-3'-phosphate
  modified_base 9: mod_base = OTHER; note = guanosine-3'-phosphate
  modified_base 10: mod_base = OTHER; note = adenosine-3'-phosphate
  modified_base 11: mod_base = OTHER; note = 2'-O-methylcytidine-3'-phosphate
  modified_base 12: mod_base = OTHER; note = adenosine-3'-phosphate
  modified_base 13: mod_base = OTHER; note = 2'-O-methyluridine-3'-phosphate
  modified_base 14: mod_base = OTHER; note = 2'-O-methyluridine-3'-phosphate
  modified_base 15: mod_base = OTHER; note = 2'-O-methylcytidine-3'-phosphate
  modified_base 16: mod_base = OTHER; note = adenosine-3'-phosphate
  modified_base 17: mod_base = OTHER; note = 2'-O-methyluridine-3'-phosphate
  modified_base 18: mod_base = OTHER; note = 2'-O-methylcytidine-3'-phosphate
  modified_base 19: mod_base = OTHER; note = 2'-O-methyluridine-3'-phosphate
  modified_base 20: mod_base = OTHER; note = 2'-deoxythymidine-3'-phosphorothioate
  misc_feature 1..19: note = RNA
  misc_feature 20..21: note = DNA
gtagcactgacattcatcttt

SEQ ID NO: 756 - DNA, 21 bp, synthetic construct
  source 1..21: mol_type = other DNA
  modified_base 1: mod_base = OTHER; note = adenosine-3'-phosphate
  modified_base 2: mod_base = OTHER; note = guanosine-3'-phosphate
  modified_base 3: mod_base = OTHER; note = adenosine-3'-phosphate
  modified_base 4: mod_base = OTHER; note = uridine-3'-phosphate
  modified_base 5: mod_base = OTHER; note = guanosine-3'-phosphate
  modified_base 6: mod_base = OTHER; note = adenosine-3'-phosphate
  modified_base 7: mod_base = OTHER; note = adenosine-3'-phosphate
  modified_base 8: mod_base = OTHER; note = uridine-3'-phosphate
  modified_base 9: mod_base = OTHER; note = guanosine-3'-phosphate
  modified_base 10: mod_base = OTHER; note = uridine-3'-phosphate
  modified_base 11: mod_base = OTHER; note = 2'-O-methylcytidine-3'-phosphate
  modified_base 12: mod_base = OTHER; note = adenosine-3'-phosphate
  modified_base 13: mod_base = OTHER; note = guanosine-3'-phosphate
  modified_base 14: mod_base = OTHER; note = uridine-3'-phosphate
  modified_base 15: mod_base = OTHER; note = guanosine-3'-phosphate
  modified_base 16: mod_base = OTHER; note = cytidine-3'-phosphate
  modified_base 17: mod_base = OTHER; note = 2'-O-methyluridine-3'-phosphate
  modified_base 18: mod_base = OTHER; note = adenosine-3'-phosphate
  modified_base 19: mod_base = OTHER; note = cytidine-3'-phosphate
  modified_base 20: mod_base = OTHER; note = 2'-deoxythymidine-3'-phosphorothioate
  misc_feature 1..19: note = RNA
  misc_feature 20..21: note = DNA
agatgaatgtcagtgctactt

SEQ ID NO: 757 - DNA, 21 bp, synthetic construct
  source 1..21: mol_type = other DNA
  modified_base 1: mod_base = OTHER; note = 2'-O-methylcytidine-3'-phosphate
  modified_base 2: mod_base = OTHER; note = 2'-O-methyluridine-3'-phosphate
  modified_base 3: mod_base = OTHER; note = guanosine-3'-phosphate
  modified_base 4: mod_base = OTHER; note = adenosine-3'-phosphate
  modified_base 5: mod_base = OTHER; note = 2'-O-methylcytidine-3'-phosphate
  modified_base 6: mod_base = OTHER; note = adenosine-3'-phosphate
  modified_base 7: mod_base = OTHER; note = 2'-O-methyluridine-3'-phosphate
  modified_base 8: mod_base = OTHER; note = 2'-O-methyluridine-3'-phosphate
  modified_base 9: mod_base = OTHER; note = 2'-O-methylcytidine-3'-phosphate
  modified_base 10: mod_base = OTHER; note = adenosine-3'-phosphate
  modified_base 11: mod_base = OTHER; note = 2'-O-methyluridine-3'-phosphate
  modified_base 12: mod_base = OTHER; note = 2'-O-methylcytidine-3'-phosphate
  modified_base 13: mod_base = OTHER; note = 2'-O-methyluridine-3'-phosphate
  modified_base 14: mod_base = OTHER; note = 2'-O-methyluridine-3'-phosphate
  modified_base 15: mod_base = OTHER; note = 2'-O-methylcytidine-3'-phosphate
  modified_base 16: mod_base = OTHER; note = 2'-O-methylcytidine-3'-phosphate
  modified_base 17: mod_base = OTHER; note = guanosine-3'-phosphate
  modified_base 18: mod_base = OTHER; note = 2'-O-methyluridine-3'-phosphate
  modified_base 19: mod_base = OTHER; note = 2'-O-methyluridine-3'-phosphate
  modified_base 20: mod_base = OTHER; note = 2'-deoxythymidine-3'-phosphorothioate
  misc_feature 1..19: note = RNA
  misc_feature 20..21: note = DNA
ctgacattcatcttccgtttt

SEQ ID NO: 758 - DNA, 21 bp, synthetic construct
  source 1..21: mol_type = other DNA
  modified_base 1: mod_base = OTHER; note = adenosine-3'-phosphate
  modified_base 2: mod_base = OTHER; note = adenosine-3'-phosphate
  modified_base 3: mod_base = OTHER; note = cytidine-3'-phosphate
  modified_base 4: mod_base = OTHER; note = guanosine-3'-phosphate
  modified_base 5: mod_base = OTHER; note = guanosine-3'-phosphate
  modified_base 6: mod_base = OTHER; note = adenosine-3'-phosphate
  modified_base 7: mod_base = OTHER; note = adenosine-3'-phosphate
  modified_base 8: mod_base = OTHER; note = guanosine-3'-phosphate
  modified_base 9: mod_base = OTHER; note = adenosine-3'-phosphate
  modified_base 10: mod_base = OTHER; note = uridine-3'-phosphate
  modified_base 11: mod_base = OTHER; note = guanosine-3'-phosphate
  modified_base 12: mod_base = OTHER; note = adenosine-3'-phosphate
  modified_base 13: mod_base = OTHER; note = adenosine-3'-phosphate
  modified_base 14: mod_base = OTHER; note = uridine-3'-phosphate
  modified_base 15: mod_base = OTHER; note = guanosine-3'-phosphate
  modified_base 16: mod_base = OTHER; note = uridine-3'-phosphate
  modified_base 17: mod_base = OTHER; note = 2'-O-methylcytidine-3'-phosphate
  modified_base 18: mod_base = OTHER; note = adenosine-3'-phosphate
  modified_base 19: mod_base = OTHER; note = guanosine-3'-phosphate
  modified_base 20: mod_base = OTHER; note = 2'-deoxythymidine-3'-phosphorothioate
  misc_feature 1..19: note = RNA
  misc_feature 20..21: note = DNA
aacggaagatgaatgtcagtt

SEQ ID NO: 759 - DNA, 21 bp, synthetic construct
  source 1..21: mol_type = other DNA
  modified_base 1: mod_base = OTHER; note = adenosine-3'-phosphate
  modified_base 2: mod_base = OTHER; note = guanosine-3'-phosphate
  modified_base 3: mod_base = OTHER; note = guanosine-3'-phosphate
  modified_base 4: mod_base = OTHER; note = guanosine-3'-phosphate
  modified_base 5: mod_base = OTHER; note = adenosine-3'-phosphate
  modified_base 6: mod_base = OTHER; note = guanosine-3'-phosphate
  modified_base 7: mod_base = OTHER; note = adenosine-3'-phosphate
  modified_base 8: mod_base = OTHER; note = adenosine-3'-phosphate
  modified_base 9: mod_base = OTHER; note = 2'-O-methyluridine-3'-phosphate
  modified_base 10: mod_base = OTHER; note = guanosine-3'-phosphate
  modified_base 11: mod_base = OTHER; note = adenosine-3'-phosphate
  modified_base 12: mod_base = OTHER; note = 2'-O-methyluridine-3'-phosphate
  modified_base 13: mod_base = OTHER; note = guanosine-3'-phosphate
  modified_base 14: mod_base = OTHER; note = guanosine-3'-phosphate
  modified_base 15: mod_base = OTHER; note = adenosine-3'-phosphate
  modified_base 16: mod_base = OTHER; note = 2'-O-methyluridine-3'-phosphate
  modified_base 17: mod_base = OTHER; note = guanosine-3'-phosphate
  modified_base 18: mod_base = OTHER; note = 2'-O-methyluridine-3'-phosphate
  modified_base 19: mod_base = OTHER; note = guanosine-3'-phosphate
  modified_base 20: mod_base = OTHER; note = 2'-deoxythymidine-3'-phosphorothioate
  misc_feature 1..19: note = RNA
  misc_feature 20..21: note = DNA
agggagaatgatggatgtgtt

SEQ ID NO: 760 - DNA, 21 bp, synthetic construct
  source 1..21: mol_type = other DNA
  modified_base 1: mod_base = OTHER; note = 2'-O-methylcytidine-3'-phosphate
  modified_base 2: mod_base = OTHER; note = adenosine-3'-phosphate
  modified_base 3: mod_base = OTHER; note = 2'-O-methylcytidine-3'-phosphate
  modified_base 4: mod_base = OTHER; note = adenosine-3'-phosphate
  modified_base 5: mod_base = OTHER; note = uridine-3'-phosphate
  modified_base 6: mod_base = OTHER; note = cytidine-3'-phosphate
  modified_base 7: mod_base = OTHER; note = 2'-O-methylcytidine-3'-phosphate
  modified_base 8: mod_base = OTHER; note = adenosine-3'-phosphate
  modified_base 9: mod_base = OTHER; note = uridine-3'-phosphate
  modified_base 10: mod_base = OTHER; note = 2'-O-methylcytidine-3'-phosphate
  modified_base 11: mod_base = OTHER; note = adenosine-3'-phosphate
  modified_base 12: mod_base = OTHER; note = uridine-3'-phosphate
  modified_base 13: mod_base = OTHER; note = uridine-3'-phosphate
  modified_base 14: mod_base = OTHER; note = cytidine-3'-phosphate
  modified_base 15: mod_base = OTHER; note = uridine-3'-phosphate
  modified_base 16: mod_base = OTHER; note = cytidine-3'-phosphate
  modified_base 17: mod_base = OTHER; note = cytidine-3'-phosphate
  modified_base 18: mod_base = OTHER; note = cytidine-3'-phosphate
  modified_base 19: mod_base = OTHER; note = uridine-3'-phosphate
  modified_base 20: mod_base = OTHER; note = 2'-deoxythymidine-3'-phosphorothioate
  misc_feature 1..19: note = RNA
  misc_feature 20..21: note = DNA
cacatccatcattctcccttt

SEQ ID NO: 761 - DNA, 21 bp, synthetic construct
  source 1..21: mol_type = other DNA
  modified_base 1: mod_base = OTHER; note = 2'-O-methyluridine-3'-phosphate
  modified_base 2: mod_base = OTHER; note = guanosine-3'-phosphate
  modified_base 3: mod_base = OTHER; note = guanosine-3'-phosphate
  modified_base 4: mod_base = OTHER; note = 2'-O-methylcytidine-3'-phosphate
  modified_base 5: mod_base = OTHER; note = adenosine-3'-phosphate
  modified_base 6: mod_base = OTHER; note = 2'-O-methyluridine-3'-phosphate
  modified_base 7: mod_base = OTHER; note = 2'-O-methylcytidine-3'-phosphate
  modified_base 8: mod_base = OTHER; note = 2'-O-methylcytidine-3'-phosphate
  modified_base 9: mod_base = OTHER; note = adenosine-3'-phosphate
  modified_base 10: mod_base = OTHER; note = adenosine-3'-phosphate
  modified_base 11: mod_base = OTHER; note = guanosine-3'-phosphate
  modified_base 12: mod_base = OTHER; note = adenosine-3'-phosphate
  modified_base 13: mod_base = OTHER; note = 2'-O-methyluridine-3'-phosphate
  modified_base 14: mod_base = OTHER; note = adenosine-3'-phosphate
  modified_base 15: mod_base = OTHER; note = 2'-O-methylcytidine-3'-phosphate
  modified_base 16: mod_base = OTHER; note = adenosine-3'-phosphate
  modified_base 17: mod_base = OTHER; note = adenosine-3'-phosphate
  modified_base 18: mod_base = OTHER; note = adenosine-3'-phosphate
  modified_base 19: mod_base = OTHER; note = 2'-O-methylcytidine-3'-phosphate
  modified_base 20: mod_base = OTHER; note = 2'-deoxythymidine-3'-phosphorothioate
  misc_feature 1..19: note = RNA
  misc_feature 20..21: note = DNA
tggcatccaagatacaaactt

SEQ ID NO: 762 - DNA, 21 bp, synthetic construct
  source 1..21: mol_type = other DNA
  modified_base 1: mod_base = OTHER; note = guanosine-3'-phosphate
  modified_base 2: mod_base = OTHER; note = uridine-3'-phosphate
  modified_base 3: mod_base = OTHER; note = uridine-3'-phosphate
  modified_base 4: mod_base = OTHER; note = uridine-3'-phosphate
  modified_base 5: mod_base = OTHER; note = guanosine-3'-phosphate
  modified_base 6: mod_base = OTHER; note = 2'-O-methyluridine-3'-phosphate
  modified_base 7: mod_base = OTHER; note = adenosine-3'-phosphate
  modified_base 8: mod_base = OTHER; note = uridine-3'-phosphate
  modified_base 9: mod_base = OTHER; note = cytidine-3'-phosphate
  modified_base 10: mod_base = OTHER; note = uridine-3'-phosphate
  modified_base 11: mod_base = OTHER; note = uridine-3'-phosphate
  modified_base 12: mod_base = OTHER; note = guanosine-3'-phosphate
  modified_base 13: mod_base = OTHER; note = guanosine-3'-phosphate
  modified_base 14: mod_base = OTHER; note = adenosine-3'-phosphate
  modified_base 15: mod_base = OTHER; note = uridine-3'-phosphate
  modified_base 16: mod_base = OTHER; note = guanosine-3'-phosphate
  modified_base 17: mod_base = OTHER; note = cytidine-3'-phosphate
  modified_base 18: mod_base = OTHER; note = 2'-O-methylcytidine-3'-phosphate
  modified_base 19: mod_base = OTHER; note = adenosine-3'-phosphate
  modified_base 20: mod_base = OTHER; note = 2'-deoxythymidine-3'-phosphorothioate
  misc_feature 1..19: note = RNA
  misc_feature 20..21: note = DNA
gtttgtatcttggatgccatt

SEQ ID NO: 763 - DNA, 21 bp, synthetic construct
  source 1..21: mol_type = other DNA
  modified_base 1: mod_base = OTHER; note = guanosine-3'-phosphate
  modified_base 2: mod_base = OTHER; note = guanosine-3'-phosphate
  modified_base 3: mod_base = OTHER; note = 2'-O-methylcytidine-3'-phosphate
  modified_base 4: mod_base = OTHER; note = adenosine-3'-phosphate
  modified_base 5: mod_base = OTHER; note = 2'-O-methyluridine-3'-phosphate
  modified_base 6: mod_base = OTHER; note = 2'-O-methylcytidine-3'-phosphate
  modified_base 7: mod_base = OTHER; note = 2'-O-methylcytidine-3'-phosphate
  modified_base 8: mod_base = OTHER; note = adenosine-3'-phosphate
  modified_base 9: mod_base = OTHER; note = adenosine-3'-phosphate
  modified_base 10: mod_base = OTHER; note = guanosine-3'-phosphate
  modified_base 11: mod_base = OTHER; note = adenosine-3'-phosphate
  modified_base 12: mod_base = OTHER; note = 2'-O-methyluridine-3'-phosphate
  modified_base 13: mod_base = OTHER; note = adenosine-3'-phosphate
  modified_base 14: mod_base = OTHER; note = 2'-O-methylcytidine-3'-phosphate
  modified_base 15: mod_base = OTHER; note = adenosine-3'-phosphate
  modified_base 16: mod_base = OTHER; note = adenosine-3'-phosphate
  modified_base 17: mod_base = OTHER; note = adenosine-3'-phosphate
  modified_base 18: mod_base = OTHER; note = 2'-O-methylcytidine-3'-phosphate
  modified_base 19: mod_base = OTHER; note = 2'-O-methyluridine-3'-phosphate
  modified_base 20: mod_base = OTHER; note = 2'-deoxythymidine-3'-phosphorothioate
  misc_feature 1..19: note = RNA
  misc_feature 20..21: note = DNA
ggcatccaagatacaaacttt

SEQ ID NO: 764 - DNA, 21 bp, synthetic construct
  source 1..21: mol_type = other DNA
  modified_base 1: mod_base = OTHER; note = adenosine-3'-phosphate
  modified_base 2: mod_base = OTHER; note = guanosine-3'-phosphate
  modified_base 3: mod_base = OTHER; note = uridine-3'-phosphate
  modified_base 4: mod_base = OTHER; note = uridine-3'-phosphate
  modified_base 5: mod_base = OTHER; note = uridine-3'-phosphate
  modified_base 6: mod_base = OTHER; note = guanosine-3'-phosphate
  modified_base 7: mod_base = OTHER; note = 2'-O-methyluridine-3'-phosphate
  modified_base 8: mod_base = OTHER; note = adenosine-3'-phosphate
  modified_base 9: mod_base = OTHER; note = uridine-3'-phosphate
  modified_base 10: mod_base = OTHER; note = cytidine-3'-phosphate
  modified_base 11: mod_base = OTHER; note = uridine-3'-phosphate
  modified_base 12: mod_base = OTHER; note = uridine-3'-phosphate
  modified_base 13: mod_base = OTHER; note = guanosine-3'-phosphate
  modified_base 14: mod_base = OTHER; note = guanosine-3'-phosphate
  modified_base 15: mod_base = OTHER; note = adenosine-3'-phosphate
  modified_base 16: mod_base = OTHER; note = uridine-3'-phosphate
  modified_base 17: mod_base = OTHER; note = guanosine-3'-phosphate
  modified_base 18: mod_base = OTHER; note = cytidine-3'-phosphate
  modified_base 19: mod_base = OTHER; note = cytidine-3'-phosphate
  modified_base 20: mod_base = OTHER; note = 2'-deoxythymidine-3'-phosphorothioate
  misc_feature 1..19: note = RNA
  misc_feature 20..21: note = DNA
agtttgtatcttggatgcctt

SEQ ID NO: 765 - DNA, 21 bp, synthetic construct
  source 1..21: mol_type = other DNA
  modified_base 1: mod_base = OTHER; note = guanosine-3'-phosphate
  modified_base 2: mod_base = OTHER; note = 2'-O-methylcytidine-3'-phosphate
  modified_base 3: mod_base = OTHER; note = adenosine-3'-phosphate
  modified_base 4: mod_base = OTHER; note = 2'-O-methyluridine-3'-phosphate
  modified_base 5: mod_base = OTHER; note = 2'-O-methylcytidine-3'-phosphate
  modified_base 6: mod_base = OTHER; note = 2'-O-methylcytidine-3'-phosphate
  modified_base 7: mod_base = OTHER; note = adenosine-3'-phosphate
  modified_base 8: mod_base = OTHER; note = adenosine-3'-phosphate
  modified_base 9: mod_base = OTHER; note = guanosine-3'-phosphate
  modified_base 10: mod_base = OTHER; note = adenosine-3'-phosphate
  modified_base 11: mod_base = OTHER; note = 2'-O-methyluridine-3'-phosphate
  modified_base 12: mod_base = OTHER; note = adenosine-3'-phosphate
  modified_base 13: mod_base = OTHER; note = 2'-O-methylcytidine-3'-phosphate
  modified_base 14: mod_base = OTHER; note = adenosine-3'-phosphate
  modified_base 15: mod_base = OTHER; note = adenosine-3'-phosphate
  modified_base 16: mod_base = OTHER; note = adenosine-3'-phosphate
  modified_base 17: mod_base = OTHER; note = 2'-O-methylcytidine-3'-phosphate
  modified_base 18: mod_base = OTHER; note = 2'-O-methyluridine-3'-phosphate
  modified_base 19: mod_base = OTHER; note = 2'-O-methylcytidine-3'-phosphate
  modified_base 20: mod_base = OTHER; note = 2'-deoxythymidine-3'-phosphorothioate
  misc_feature 1..19: note = RNA
  misc_feature 20..21: note = DNA
gcatccaagatacaaactctt

SEQ ID NO: 766 - DNA, 21 bp, synthetic construct
  source 1..21: mol_type = other DNA
  modified_base 1: mod_base = OTHER; note = guanosine-3'-phosphate
  modified_base 2: mod_base = OTHER; note = adenosine-3'-phosphate
  modified_base 3: mod_base = OTHER; note = guanosine-3'-phosphate
  modified_base 4: mod_base = OTHER; note = uridine-3'-phosphate
  modified_base 5: mod_base = OTHER; note = uridine-3'-phosphate
  modified_base 6: mod_base = OTHER; note = uridine-3'-phosphate
  modified_base 7: mod_base = OTHER; note = guanosine-3'-phosphate
  modified_base 8: mod_base = OTHER; note = 2'-O-methyluridine-3'-phosphate
  modified_base 9: mod_base = OTHER; note = adenosine-3'-phosphate
  modified_base 10: mod_base = OTHER; note = uridine-3'-phosphate
  modified_base 11: mod_base = OTHER; note = cytidine-3'-phosphate
  modified_base 12: mod_base = OTHER; note = uridine-3'-phosphate
  modified_base 13: mod_base = OTHER; note = uridine-3'-phosphate
  modified_base 14: mod_base = OTHER; note = guanosine-3'-phosphate
  modified_base 15: mod_base = OTHER; note = guanosine-3'-phosphate
  modified_base 16: mod_base = OTHER; note = adenosine-3'-phosphate
  modified_base 17: mod_base = OTHER; note = uridine-3'-phosphate
  modified_base 18: mod_base = OTHER; note = guanosine-3'-phosphate
  modified_base 19: mod_base = OTHER; note = cytidine-3'-phosphate
  modified_base 20: mod_base = OTHER; note = 2'-deoxythymidine-3'-phosphorothioate
  misc_feature 1..19: note = RNA
  misc_feature 20..21: note = DNA
gagtttgtatcttggatgctt

SEQ ID NO: 767 - DNA, 21 bp, synthetic construct
  source 1..21: mol_type = other DNA
  modified_base 1: mod_base = OTHER; note = 2'-O-methylcytidine-3'-phosphate
  modified_base 2: mod_base = OTHER; note = adenosine-3'-phosphate
  modified_base 3: mod_base = OTHER; note = adenosine-3'-phosphate
  modified_base 4: mod_base = OTHER; note = adenosine-3'-phosphate
  modified_base 5: mod_base = OTHER; note = guanosine-3'-phosphate
  modified_base 6: mod_base = OTHER; note = 2'-O-methyluridine-3'-phosphate
  modified_base 7: mod_base = OTHER; note = guanosine-3'-phosphate
  modified_base 8: mod_base = OTHER; note = adenosine-3'-phosphate
  modified_base 9: mod_base = OTHER; note = 2'-O-methyluridine-3'-phosphate
  modified_base 10: mod_base = OTHER; note = adenosine-3'-phosphate
  modified_base 11: mod_base = OTHER; note = 2'-O-methylcytidine-3'-phosphate
  modified_base 12: mod_base = OTHER; note = adenosine-3'-phosphate
  modified_base 13: mod_base = OTHER; note = 2'-O-methylcytidine-3'-phosphate
  modified_base 14: mod_base = OTHER; note = adenosine-3'-phosphate
  modified_base 15: mod_base = OTHER; note = 2'-O-methyluridine-3'-phosphate
  modified_base 16: mod_base = OTHER; note = 2'-O-methyluridine-3'-phosphate
  modified_base 17: mod_base = OTHER; note = 2'-O-methyluridine-3'-phosphate
  modified_base 18: mod_base = OTHER; note = guanosine-3'-phosphate
  modified_base 19: mod_base = OTHER; note = guanosine-3'-phosphate
  modified_base 20: mod_base = OTHER; note = 2'-deoxythymidine-3'-phosphorothioate
  misc_feature 1..19: note = RNA
  misc_feature 20..21: note = DNA
caaagtgatacacatttggtt

SEQ ID NO: 768 - DNA, 21 bp, synthetic construct
  source 1..21: mol_type = other DNA
  modified_base 1: mod_base = OTHER; note = cytidine-3'-phosphate
  modified_base 2: mod_base = OTHER; note = 2'-O-methylcytidine-3'-phosphate
  modified_base 3: mod_base = OTHER; note = adenosine-3'-phosphate
  modified_base 4: mod_base = OTHER; note = adenosine-3'-phosphate
  modified_base 5: mod_base = OTHER; note = adenosine-3'-phosphate
  modified_base 6: mod_base = OTHER; note = uridine-3'-phosphate
  modified_base 7: mod_base = OTHER; note = guanosine-3'-phosphate
  modified_base 8: mod_base = OTHER; note = uridine-3'-phosphate
  modified_base 9: mod_base = OTHER; note = guanosine-3'-phosphate
  modified_base 10: mod_base = OTHER; note = 2'-O-methyluridine-3'-phosphate
  modified_base 11: mod_base = OTHER; note = adenosine-3'-phosphate
  modified_base 12: mod_base = OTHER; note = uridine-3'-phosphate
  modified_base 13: mod_base = OTHER; note = 2'-O-methylcytidine-3'-phosphate
  modified_base 14: mod_base = OTHER; note = adenosine-3'-phosphate
  modified_base 15: mod_base = OTHER; note = cytidine-3'-phosphate
  modified_base 16: mod_base = OTHER; note = uridine-3'-phosphate
  modified_base 17: mod_base = OTHER; note = uridine-3'-phosphate
  modified_base 18: mod_base = OTHER; note = uridine-3'-phosphate
  modified_base 19: mod_base = OTHER; note = guanosine-3'-phosphate
  modified_base 20: mod_base = OTHER; note = 2'-deoxythymidine-3'-phosphorothioate
  misc_feature 1..19: note = RNA
  misc_feature 20..21: note = DNA
ccaaatgtgtatcactttgtt

SEQ ID NO: 769 - DNA, 21 bp, synthetic construct
  source 1..21: mol_type = other DNA
  modified_base 1: mod_base = OTHER; note = guanosine-3'-phosphate
  modified_base 2: mod_base = OTHER; note = 2'-O-methyluridine-3'-phosphate
  modified_base 3: mod_base = OTHER; note = guanosine-3'-phosphate
  modified_base 4: mod_base = OTHER; note = adenosine-3'-phosphate
  modified_base 5: mod_base = OTHER; note = 2'-O-methyluridine-3'-phosphate
  modified_base 6: mod_base = OTHER; note = adenosine-3'-phosphate
  modified_base 7: mod_base = OTHER; note = 2'-O-methylcytidine-3'-phosphate
  modified_base 8: mod_base = OTHER; note = adenosine-3'-phosphate
  modified_base 9: mod_base = OTHER; note = 2'-O-methylcytidine-3'-phosphate
  modified_base 10: mod_base = OTHER; note = adenosine-3'-phosphate
  modified_base 11: mod_base = OTHER; note = 2'-O-methyluridine-3'-phosphate
  modified_base 12: mod_base = OTHER; note = 2'-O-methyluridine-3'-phosphate
  modified_base 13: mod_base = OTHER; note = 2'-O-methyluridine-3'-phosphate
  modified_base 14: mod_base = OTHER; note = guanosine-3'-phosphate
  modified_base 15: mod_base = OTHER; note = guanosine-3'-phosphate
  modified_base 16: mod_base = OTHER; note = adenosine-3'-phosphate
  modified_base 17: mod_base = OTHER; note = guanosine-3'-phosphate
  modified_base 18: mod_base = OTHER; note = guanosine-3'-phosphate
  modified_base 19: mod_base = OTHER; note = adenosine-3'-phosphate
  modified_base 20: mod_base = OTHER; note = 2'-deoxythymidine-3'-phosphorothioate
  misc_feature 1..19: note = RNA
  misc_feature 20..21: note = DNA
gtgatacacatttggaggatt

SEQ ID NO: 770 - DNA, 21 bp, synthetic construct
  source 1..21: mol_type = other DNA
  modified_base 1: mod_base = OTHER; note = uridine-3'-phosphate
  modified_base 2: mod_base = OTHER; note = cytidine-3'-phosphate
  modified_base 3: mod_base = OTHER; note = cytidine-3'-phosphate
  modified_base 4: mod_base = OTHER; note = uridine-3'-phosphate
  modified_base 5: mod_base = OTHER; note = cytidine-3'-phosphate
  modified_base 6: mod_base = OTHER; note = 2'-O-methylcytidine-3'-phosphate
  modified_base 7: mod_base = OTHER; note = adenosine-3'-phosphate
  modified_base 8: mod_base = OTHER; note = adenosine-3'-phosphate
  modified_base 9: mod_base = OTHER; note = adenosine-3'-phosphate
  modified_base 10: mod_base = OTHER; note = uridine-3'-phosphate
  modified_base 11: mod_base = OTHER; note = guanosine-3'-phosphate
  modified_base 12: mod_base = OTHER; note = uridine-3'-phosphate
  modified_base 13: mod_base = OTHER; note = guanosine-3'-phosphate
  modified_base 14: mod_base = OTHER; note = 2'-O-methyluridine-3'-phosphate
  modified_base 15: mod_base = OTHER; note = adenosine-3'-phosphate
  modified_base 16: mod_base = OTHER; note = uridine-3'-phosphate
  modified_base 17: mod_base = OTHER; note = 2'-O-methylcytidine-3'-phosphate
  modified_base 18: mod_base = OTHER; note = adenosine-3'-phosphate
  modified_base 19: mod_base = OTHER; note = cytidine-3'-phosphate
  modified_base 20: mod_base = OTHER; note = 2'-deoxythymidine-3'-phosphorothioate
  misc_feature 1..19: note = RNA
  misc_feature 20..21: note = DNA
tcctccaaatgtgtatcactt

SEQ ID NO: 771 - DNA, 21 bp, synthetic construct
  source 1..21: mol_type = other DNA
  modified_base 1: mod_base = OTHER; note = adenosine-3'-phosphate
  modified_base 2: mod_base = OTHER; note = 2'-O-methylcytidine-3'-phosphate
  modified_base 3: mod_base = OTHER; note = adenosine-3'-phosphate
  modified_base 4: mod_base = OTHER; note = 2'-O-methylcytidine-3'-phosphate
  modified_base 5: mod_base = OTHER; note = adenosine-3'-phosphate
  modified_base 6: mod_base = OTHER; note = 2'-O-methyluridine-3'-phosphate
  modified_base 7: mod_base = OTHER; note = 2'-O-methyluridine-3'-phosphate
  modified_base 8: mod_base = OTHER; note = 2'-O-methyluridine-3'-phosphate
  modified_base 9: mod_base = OTHER; note = guanosine-3'-phosphate
  modified_base 10: mod_base = OTHER; note = guanosine-3'-phosphate
  modified_base 11: mod_base = OTHER; note = adenosine-3'-phosphate
  modified_base 12: mod_base = OTHER; note = guanosine-3'-phosphate
  modified_base 13: mod_base = OTHER; note = guanosine-3'-phosphate
  modified_base 14: mod_base = OTHER; note = adenosine-3'-phosphate
  modified_base 15: mod_base = OTHER; note = guanosine-3'-phosphate
  modified_base 16: mod_base = OTHER; note = adenosine-3'-phosphate
  modified_base 17: mod_base = OTHER; note = 2'-O-methylcytidine-3'-phosphate
  modified_base 18: mod_base = OTHER; note = guanosine-3'-phosphate
  modified_base 19: mod_base = OTHER; note = 2'-O-methyluridine-3'-phosphate
  modified_base 20: mod_base = OTHER; note = 2'-deoxythymidine-3'-phosphorothioate
  misc_feature 1..19: note = RNA
  misc_feature 20..21: note = DNA
acacatttggaggagacgttt

SEQ ID NO: 772 - DNA, 21 bp, synthetic construct
  source 1..21: mol_type = other DNA
  modified_base 1: mod_base = OTHER; note = adenosine-3'-phosphate
  modified_base 2: mod_base = OTHER; note = cytidine-3'-phosphate
  modified_base 3: mod_base = OTHER; note = guanosine-3'-phosphate
  modified_base 4: mod_base = OTHER; note = uridine-3'-phosphate
  modified_base 5: mod_base = OTHER; note = cytidine-3'-phosphate
  modified_base 6: mod_base = OTHER; note = uridine-3'-phosphate
  modified_base 7: mod_base = OTHER; note = cytidine-3'-phosphate
  modified_base 8: mod_base = OTHER; note = cytidine-3'-phosphate
  modified_base 9: mod_base = OTHER; note = uridine-3'-phosphate
  modified_base 10: mod_base = OTHER; note = cytidine-3'-phosphate
  modified_base 11: mod_base = OTHER; note = 2'-O-methylcytidine-3'-phosphate
  modified_base 12: mod_base = OTHER; note = adenosine-3'-phosphate
  modified_base 13: mod_base = OTHER; note = adenosine-3'-phosphate
  modified_base 14: mod_base = OTHER; note = adenosine-3'-phosphate
  modified_base 15: mod_base = OTHER; note = uridine-3'-phosphate
  modified_base 16: mod_base = OTHER; note = guanosine-3'-phosphate
  modified_base 17: mod_base = OTHER; note = uridine-3'-phosphate
  modified_base 18: mod_base = OTHER; note = guanosine-3'-phosphate
  modified_base 19: mod_base = OTHER; note = uridine-3'-phosphate
  modified_base 20: mod_base = OTHER; note = 2'-deoxythymidine-3'-phosphorothioate
  misc_feature 1..19: note = RNA
  misc_feature 20..21: note = DNA
acgtctcctccaaatgtgttt

SEQ ID NO: 773 - DNA, 21 bp, synthetic construct
  source 1..21: mol_type = other DNA
  modified_base 1: mod_base = OTHER; note = adenosine-3'-phosphate
  modified_base 2: mod_base = OTHER; note = 2'-O-methylcytidine-3'-phosphate
  modified_base 3: mod_base = OTHER; note = adenosine-3'-phosphate
  modified_base 4: mod_base = OTHER; note = 2'-O-methyluridine-3'-phosphate
  modified_base 5: mod_base = OTHER; note = 2'-O-methyluridine-3'-phosphate
  modified_base 6: mod_base = OTHER; note = 2'-O-methyluridine-3'-phosphate
  modified_base 7: mod_base = OTHER; note = guanosine-3'-phosphate
  modified_base 8: mod_base = OTHER; note = guanosine-3'-phosphate
  modified_base 9: mod_base = OTHER; note = adenosine-3'-phosphate
  modified_base 10: mod_base = OTHER; note = guanosine-3'-phosphate
  modified_base 11: mod_base = OTHER; note = guanosine-3'-phosphate
  modified_base 12: mod_base = OTHER; note = adenosine-3'-phosphate
  modified_base 13: mod_base = OTHER; note = guanosine-3'-phosphate
  modified_base 14: mod_base = OTHER; note = adenosine-3'-phosphate
  modified_base 15: mod_base = OTHER; note = 2'-O-methylcytidine-3'-phosphate
  modified_base 16: mod_base = OTHER; note = guanosine-3'-phosphate
  modified_base 17: mod_base = OTHER; note = 2'-O-methyluridine-3'-phosphate
  modified_base 18: mod_base = OTHER; note = adenosine-3'-phosphate
  modified_base 19: mod_base = OTHER; note = adenosine-3'-phosphate
  modified_base 20: mod_base = OTHER; note = 2'-deoxythymidine-3'-phosphorothioate
  misc_feature 1..19: note = RNA
  misc_feature 20..21: note = DNA
acatttggaggagacgtaatt

SEQ ID NO: 774 - DNA, 21 bp, synthetic construct
  source 1..21: mol_type = other DNA
  modified_base 1: mod_base = OTHER; note = uridine-3'-phosphate
  modified_base 2: mod_base = OTHER; note = 2'-O-methyluridine-3'-phosphate
  modified_base 3: mod_base = OTHER; note = adenosine-3'-phosphate
  modified_base 4: mod_base = OTHER; note = cytidine-3'-phosphate
  modified_base 5: mod_base = OTHER; note = guanosine-3'-phosphate
  modified_base 6: mod_base = OTHER; note = uridine-3'-phosphate
  modified_base 7: mod_base = OTHER; note = cytidine-3'-phosphate
  modified_base 8: mod_base = OTHER; note = uridine-3'-phosphate
  modified_base 9: mod_base = OTHER; note = cytidine-3'-phosphate
  modified_base 10: mod_base = OTHER; note = cytidine-3'-phosphate
  modified_base 11: mod_base = OTHER; note = uridine-3'-phosphate
  modified_base 12: mod_base = OTHER; note = cytidine-3'-phosphate
  modified_base 13: mod_base = OTHER; note = 2'-O-methylcytidine-3'-phosphate
  modified_base 14: mod_base = OTHER; note = adenosine-3'-phosphate
  modified_base 15: mod_base = OTHER; note = adenosine-3'-phosphate
  modified_base 16: mod_base = OTHER; note = adenosine-3'-phosphate
  modified_base 17: mod_base = OTHER; note = uridine-3'-phosphate
  modified_base 18: mod_base = OTHER; note = guanosine-3'-phosphate
  modified_base 19: mod_base = OTHER; note = uridine-3'-phosphate
  modified_base 20: mod_base = OTHER; note = 2'-deoxythymidine-3'-phosphorothioate
  misc_feature 1..19: note = RNA
  misc_feature 20..21: note = DNA
ttacgtctcctccaaatgttt

SEQ ID NO: 775 - DNA, 21 bp, synthetic construct
  source 1..21: mol_type = other DNA
  modified_base 1: mod_base = OTHER; note = 2'-O-methylcytidine-3'-phosphate
  modified_base 2: mod_base = OTHER; note = adenosine-3'-phosphate
  modified_base 3: mod_base = OTHER; note = 2'-O-methyluridine-3'-phosphate
  modified_base 4: mod_base = OTHER; note = 2'-O-methyluridine-3'-phosphate
  modified_base 5: mod_base = OTHER; note = 2'-O-methyluridine-3'-phosphate
  modified_base 6: mod_base = OTHER; note = guanosine-3'-phosphate
  modified_base 7: mod_base = OTHER; note = guanosine-3'-phosphate
  modified_base 8: mod_base = OTHER; note = adenosine-3'-phosphate
  modified_base 9: mod_base = OTHER; note = guanosine-3'-phosphate
  modified_base 10: mod_base = OTHER; note = guanosine-3'-phosphate
  modified_base 11: mod_base = OTHER; note = adenosine-3'-phosphate
  modified_base 12: mod_base = OTHER; note = guanosine-3'-phosphate
  modified_base 13: mod_base = OTHER; note = adenosine-3'-phosphate
  modified_base 14: mod_base = OTHER; note = 2'-O-methylcytidine-3'-phosphate
  modified_base 15: mod_base = OTHER; note = guanosine-3'-phosphate
  modified_base 16: mod_base = OTHER; note = 2'-O-methyluridine-3'-phosphate
  modified_base 17: mod_base = OTHER; note = adenosine-3'-phosphate
  modified_base 18: mod_base = OTHER; note = adenosine-3'-phosphate
  modified_base 19: mod_base = OTHER; note = 2'-O-methyluridine-3'-phosphate
  modified_base 20: mod_base = OTHER; note = 2'-deoxythymidine-3'-phosphorothioate
  misc_feature 1..19: note = RNA
  misc_feature 20..21: note = DNA
catttggaggagacgtaattt

SEQ ID NO: 776 - DNA, 21 bp, synthetic construct
  source 1..21: mol_type = other DNA
  modified_base 1: mod_base = OTHER; note = adenosine-3'-phosphate
  modified_base 2: mod_base = OTHER; note = uridine-3'-phosphate
  modified_base 3: mod_base = OTHER; note = 2'-O-methyluridine-3'-phosphate
  modified_base 4: mod_base = OTHER; note = adenosine-3'-phosphate
  modified_base 5: mod_base = OTHER; note = cytidine-3'-phosphate
  modified_base 6: mod_base = OTHER; note = guanosine-3'-phosphate
  modified_base 7: mod_base = OTHER; note = uridine-3'-phosphate
  modified_base 8: mod_base = OTHER; note = cytidine-3'-phosphate
  modified_base 9: mod_base = OTHER; note = uridine-3'-phosphate
  modified_base 10: mod_base = OTHER; note = cytidine-3'-phosphate
  modified_base 11: mod_base = OTHER; note = cytidine-3'-phosphate
  modified_base 12: mod_base = OTHER; note = uridine-3'-phosphate
  modified_base 13: mod_base = OTHER; note = cytidine-3'-phosphate
  modified_base 14: mod_base = OTHER; note = 2'-O-methylcytidine-3'-phosphate
  modified_base 15: mod_base = OTHER; note = adenosine-3'-phosphate
  modified_base 16: mod_base = OTHER; note = adenosine-3'-phosphate
  modified_base 17: mod_base = OTHER; note = adenosine-3'-phosphate
  modified_base 18: mod_base = OTHER; note = uridine-3'-phosphate
  modified_base 19: mod_base = OTHER; note = guanosine-3'-phosphate
  modified_base 20: mod_base = OTHER; note = 2'-deoxythymidine-3'-phosphorothioate
  misc_feature 1..19: note = RNA
  misc_feature 20..21: note = DNA
attacgtctcctccaaatgtt

SEQ ID NO: 777 - DNA, 21 bp, synthetic construct
  source 1..21: mol_type = other DNA
  modified_base 1: mod_base = OTHER; note = guanosine-3'-phosphate
  modified_base 2: mod_base = OTHER; note = guanosine-3'-phosphate
  modified_base 3: mod_base = OTHER; note = adenosine-3'-phosphate
  modified_base 4: mod_base = OTHER; note = guanosine-3'-phosphate
  modified_base 5: mod_base = OTHER; note = guanosine-3'-phosphate
  modified_base 6: mod_base = OTHER; note = adenosine-3'-phosphate
  modified_base 7: mod_base = OTHER; note = guanosine-3'-phosphate
  modified_base 8: mod_base = OTHER; note = adenosine-3'-phosphate
  modified_base 9: mod_base = OTHER; note = 2'-O-methylcytidine-3'-phosphate
  modified_base 10: mod_base = OTHER; note = guanosine-3'-phosphate
  modified_base 11: mod_base = OTHER; note = 2'-O-methyluridine-3'-phosphate
  modified_base 12: mod_base = OTHER; note = adenosine-3'-phosphate
  modified_base 13: mod_base = OTHER; note = adenosine-3'-phosphate
  modified_base 14: mod_base = OTHER; note = 2'-O-methyluridine-3'-phosphate
  modified_base 15: mod_base = OTHER; note = 2'-O-methylcytidine-3'-phosphate
  modified_base 16: mod_base = OTHER; note = 2'-O-methylcytidine-3'-phosphate
  modified_base 17: mod_base = OTHER; note = adenosine-3'-phosphate
  modified_base 18: mod_base = OTHER; note = guanosine-3'-phosphate
  modified_base 19: mod_base = OTHER; note = 2'-O-methylcytidine-3'-phosphate
  modified_base 20: mod_base = OTHER; note = 2'-deoxythymidine-3'-phosphorothioate
  misc_feature 1..19: note = RNA
  misc_feature 20..21: note = DNA
ggaggagacgtaatccagctt

SEQ ID NO: 778 - DNA, 21 bp, synthetic construct
  source 1..21: mol_type = other DNA
  modified_base 1: mod_base = OTHER; note = guanosine-3'-phosphate
  modified_base 2: mod_base = OTHER; note = cytidine-3'-phosphate
  modified_base 3: mod_base = OTHER; note = uridine-3'-phosphate
  modified_base 4: mod_base = OTHER; note = guanosine-3'-phosphate
  modified_base 5: mod_base = OTHER; note = guanosine-3'-phosphate
  modified_base 6: mod_base = OTHER; note = adenosine-3'-phosphate
  modified_base 7: mod_base = OTHER; note = uridine-3'-phosphate
  modified_base 8: mod_base = OTHER; note = 2'-O-methyluridine-3'-phosphate
  modified_base 9: mod_base = OTHER; note = adenosine-3'-phosphate
  modified_base 10: mod_base = OTHER; note = cytidine-3'-phosphate
  modified_base 11: mod_base = OTHER; note = guanosine-3'-phosphate
  modified_base 12: mod_base = OTHER; note = uridine-3'-phosphate
  modified_base 13: mod_base = OTHER; note = cytidine-3'-phosphate
  modified_base 14: mod_base = OTHER; note = uridine-3'-phosphate
  modified_base 15: mod_base = OTHER; note = cytidine-3'-phosphate
  modified_base 16: mod_base = OTHER; note = cytidine-3'-phosphate
  modified_base 17: mod_base = OTHER; note = uridine-3'-phosphate
  modified_base 18: mod_base = OTHER; note = cytidine-3'-phosphate
  modified_base 19: mod_base = OTHER; note = cytidine-3'-phosphate
  modified_base 20: mod_base = OTHER; note = 2'-deoxythymidine-3'-phosphorothioate
  misc_feature 1..19: note = RNA
  misc_feature 20..21: note = DNA
gctggattacgtctcctcctt

SEQ ID NO: 779 - DNA, 21 bp, synthetic construct
  source 1..21: mol_type = other DNA
  modified_base 1: mod_base = OTHER; note = adenosine-3'-phosphate
  modified_base 2: mod_base = OTHER; note = 2'-O-methylcytidine-3'-phosphate
  modified_base 3: mod_base = OTHER; note = guanosine-3'-phosphate
  modified_base 4: mod_base = OTHER; note = 2'-O-methyluridine-3'-phosphate
  modified_base 5: mod_base = OTHER; note = adenosine-3'-phosphate
  modified_base 6: mod_base = OTHER; note = adenosine-3'-phosphate
  modified_base 7: mod_base = OTHER; note = 2'-O-methyluridine-3'-phosphate
  modified_base 8: mod_base = OTHER; note = 2'-O-methylcytidine-3'-phosphate
  modified_base 9: mod_base = OTHER; note = 2'-O-methylcytidine-3'-phosphate
  modified_base 10: mod_base = OTHER; note = adenosine-3'-phosphate
  modified_base 11: mod_base = OTHER; note = guanosine-3'-phosphate
  modified_base 12: mod_base = OTHER; note = 2'-O-methylcytidine-3'-phosphate
  modified_base 13: mod_base = OTHER; note = adenosine-3'-phosphate
  modified_base 14: mod_base = OTHER; note = 2'-O-methyluridine-3'-phosphate
  modified_base 15: mod_base = OTHER; note = 2'-O-methyluridine-3'-phosphate
  modified_base 16: mod_base = OTHER; note = guanosine-3'-phosphate
  modified_base 17: mod_base = OTHER; note = guanosine-3'-phosphate
  modified_base 18: mod_base = OTHER; note = adenosine-3'-phosphate
  modified_base 19: mod_base = OTHER; note = adenosine-3'-phosphate
  modified_base 20: mod_base = OTHER; note = 2'-deoxythymidine-3'-phosphorothioate
  misc_feature 1..19: note = RNA
  misc_feature 20..21: note = DNA
acgtaatccagcattggaatt

SEQ ID NO: 780 - DNA, 21 bp, synthetic construct
  source 1..21: mol_type = other DNA
  modified_base 1: mod_base = OTHER; note = uridine-3'-phosphate
  modified_base 2: mod_base = OTHER; note = uridine-3'-phosphate
  modified_base 3: mod_base = OTHER; note = cytidine-3'-phosphate
  modified_base 4: mod_base = OTHER; note = 2'-O-methylcytidine-3'-phosphate
  modified_base 5: mod_base = OTHER; note = adenosine-3'-phosphate
  modified_base 6: mod_base = OTHER; note = adenosine-3'-phosphate
  modified_base 7: mod_base = OTHER; note = uridine-3'-phosphate
  modified_base 8: mod_base = OTHER; note = guanosine-3'-phosphate
  modified_base 9: mod_base = OTHER; note = cytidine-3'-phosphate
  modified_base 10: mod_base = OTHER; note = uridine-3'-phosphate
  modified_base 11: mod_base = OTHER; note = guanosine-3'-phosphate
  modified_base 12: mod_base = OTHER; note = guanosine-3'-phosphate
  modified_base 13: mod_base = OTHER; note = adenosine-3'-phosphate
  modified_base 14: mod_base = OTHER; note = uridine-3'-phosphate
  modified_base 15: mod_base = OTHER; note = 2'-O-methyluridine-3'-phosphate
  modified_base 16: mod_base = OTHER; note = adenosine-3'-phosphate
  modified_base 17: mod_base = OTHER; note = cytidine-3'-phosphate
  modified_base 18: mod_base = OTHER; note = guanosine-3'-phosphate
  modified_base 19: mod_base = OTHER; note = uridine-3'-phosphate
  modified_base 20: mod_base = OTHER; note = 2'-deoxythymidine-3'-phosphorothioate
  misc_feature 1..19: note = RNA
  misc_feature 20..21: note = DNA
ttccaatgctggattacgttt

SEQ ID NO: 781 - DNA, 21 bp, synthetic construct
  source 1..21: mol_type = other DNA
  modified_base 1: mod_base = OTHER; note = adenosine-3'-phosphate
  modified_base 2: mod_base = OTHER; note = adenosine-3'-phosphate
  modified_base 3: mod_base = OTHER; note = 2'-O-methylcytidine-3'-phosphate
  modified_base 4: mod_base = OTHER; note = 2'-O-methylcytidine-3'-phosphate
  modified_base 5: mod_base = OTHER; note = 2'-O-methyluridine-3'-phosphate
  modified_base 6: mod_base = OTHER; note = guanosine-3'-phosphate
  modified_base 7: mod_base = OTHER; note = 2'-O-methyluridine-3'-phosphate
  modified_base 8: mod_base = OTHER; note = guanosine-3'-phosphate
  modified_base 9: mod_base = OTHER; note = guanosine-3'-phosphate
  modified_base 10: mod_base = OTHER; note = 2'-O-methyluridine-3'-phosphate
  modified_base 11: mod_base = OTHER; note = 2'-O-methyluridine-3'-phosphate
  modified_base 12: mod_base = OTHER; note = 2'-O-methyluridine-3'-phosphate
  modified_base 13: mod_base = OTHER; note = adenosine-3'-phosphate
  modified_base 14: mod_base = OTHER; note = guanosine-3'-phosphate
  modified_base 15: mod_base = OTHER; note = guanosine-3'-phosphate
  modified_base 16: mod_base = OTHER; note = guanosine-3'-phosphate
  modified_base 17: mod_base = OTHER; note = guanosine-3'-phosphate
  modified_base 18: mod_base = OTHER; note = 2'-O-methyluridine-3'-phosphate
  modified_base 19: mod_base = OTHER; note = 2'-O-methyluridine-3'-phosphate
  modified_base 20: mod_base = OTHER; note = 2'-deoxythymidine-3'-phosphorothioate
  misc_feature 1..19: note = RNA
  misc_feature 20..21: note = DNA
aacctgtggtttaggggtttt

SEQ ID NO: 782 - DNA, 21 bp, synthetic construct
  source 1..21: mol_type = other DNA
  modified_base 1: mod_base = OTHER; note = adenosine-3'-phosphate
  modified_base 2: mod_base = OTHER; note = adenosine-3'-phosphate
  modified_base 3: mod_base = OTHER; note = cytidine-3'-phosphate
  modified_base 4: mod_base = OTHER; note = cytidine-3'-phosphate
  modified_base 5: mod_base = OTHER; note = cytidine-3'-phosphate
  modified_base 6: mod_base = OTHER; note = cytidine-3'-phosphate
  modified_base 7: mod_base = OTHER; note = 2'-O-methyluridine-3'-phosphate
  modified_base 8: mod_base = OTHER; note = adenosine-3'-phosphate
  modified_base 9: mod_base = OTHER; note = adenosine-3'-phosphate
  modified_base 10: mod_base = OTHER; note = adenosine-3'-phosphate
  modified_base 11: mod_base = OTHER; note = cytidine-3'-phosphate
  modified_base 12: mod_base = OTHER; note = 2'-O-methylcytidine-3'-phosphate
  modified_base 13: mod_base = OTHER; note = adenosine-3'-phosphate
  modified_base 14: mod_base = OTHER; note = 2'-O-methylcytidine-3'-phosphate
  modified_base 15: mod_base = OTHER; note = adenosine-3'-phosphate
  modified_base 16: mod_base = OTHER; note = guanosine-3'-phosphate
  modified_base 17: mod_base = OTHER; note = guanosine-3'-phosphate
  modified_base 18: mod_base = OTHER; note = uridine-3'-phosphate
  modified_base 19: mod_base = OTHER; note = uridine-3'-phosphate
  modified_base 20: mod_base = OTHER; note = 2'-deoxythymidine-3'-phosphorothioate
  misc_feature 1..19: note = RNA
  misc_feature 20..21: note = DNA
aacccctaaaccacaggtttt

SEQ ID NO: 783 - DNA, 21 bp, synthetic construct
  source 1..21: mol_type = other DNA
  modified_base 1: mod_base = OTHER; note = 2'-O-methylcytidine-3'-phosphate
  modified_base 2: mod_base = OTHER; note = 2'-O-methylcytidine-3'-phosphate
  modified_base 3: mod_base = OTHER; note = 2'-O-methyluridine-3'-phosphate
  modified_base 4: mod_base = OTHER; note = guanosine-3'-phosphate
  modified_base 5: mod_base = OTHER; note = 2'-O-methyluridine-3'-phosphate
  modified_base 6: mod_base = OTHER; note = guanosine-3'-phosphate
  modified_base 7: mod_base = OTHER; note = guanosine-3'-phosphate
  modified_base 8: mod_base = OTHER; note = 2'-O-methyluridine-3'-phosphate
  modified_base 9: mod_base = OTHER; note = 2'-O-methyluridine-3'-phosphate
  modified_base 10: mod_base = OTHER; note = 2'-O-methyluridine-3'-phosphate
  modified_base 11: mod_base = OTHER; note = adenosine-3'-phosphate
  modified_base 12: mod_base = OTHER; note = guanosine-3'-phosphate
  modified_base 13: mod_base = OTHER; note = guanosine-3'-phosphate
  modified_base 14: mod_base = OTHER; note = guanosine-3'-phosphate
  modified_base 15: mod_base = OTHER; note = guanosine-3'-phosphate
  modified_base 16: mod_base = OTHER; note = 2'-O-methyluridine-3'-phosphate
  modified_base 17: mod_base = OTHER; note = 2'-O-methyluridine-3'-phosphate
  modified_base 18: mod_base = OTHER; note = 2'-O-methylcytidine-3'-phosphate
  modified_base 19: mod_base = OTHER; note = adenosine-3'-phosphate
  modified_base 20: mod_base = OTHER; note = 2'-deoxythymidine-3'-phosphorothioate
  misc_feature 1..19: note = RNA
  misc_feature 20..21: note = DNA
cctgtggtttaggggttcatt

SEQ ID NO: 784 - DNA, 21 bp, synthetic construct
  source 1..21: mol_type = other DNA
  modified_base 1: mod_base = OTHER; note = uridine-3'-phosphate
  modified_base 2: mod_base = OTHER; note = guanosine-3'-phosphate
  modified_base 3: mod_base = OTHER; note = adenosine-3'-phosphate
  modified_base 4: mod_base = OTHER; note = adenosine-3'-phosphate
  modified_base 5: mod_base = OTHER; note = cytidine-3'-phosphate
  modified_base 6: mod_base = OTHER; note = cytidine-3'-phosphate
  modified_base 7: mod_base = OTHER; note = cytidine-3'-phosphate
  modified_base 8: mod_base = OTHER; note = cytidine-3'-phosphate
  modified_base 9: mod_base = OTHER; note = 2'-O-methyluridine-3'-phosphate
  modified_base 10: mod_base = OTHER; note = adenosine-3'-phosphate
  modified_base 11: mod_base = OTHER; note = adenosine-3'-phosphate
  modified_base 12: mod_base = OTHER; note = adenosine-3'-phosphate
  modified_base 13: mod_base = OTHER; note = cytidine-3'-phosphate
  modified_base 14: mod_base = OTHER; note = 2'-O-methylcytidine-3'-phosphate
  modified_base 15: mod_base = OTHER; note = adenosine-3'-phosphate
  modified_base 16: mod_base = OTHER; note = 2'-O-methylcytidine-3'-phosphate
  modified_base 17: mod_base = OTHER; note = adenosine-3'-phosphate
  modified_base 18: mod_base = OTHER; note = guanosine-3'-phosphate
  modified_base 19: mod_base = OTHER; note = guanosine-3'-phosphate
  modified_base 20: mod_base = OTHER; note = 2'-deoxythymidine-3'-phosphorothioate
  misc_feature 1..19: note = RNA
  misc_feature 20..21: note = DNA
tgaacccctaaaccacaggtt

SEQ ID NO: 785 - DNA, 21 bp, synthetic construct
  source 1..21: mol_type = other DNA
  modified_base 1: mod_base = OTHER; note = 2'-O-methylcytidine-3'-phosphate
  modified_base 2: mod_base = OTHER; note = 2'-O-methyluridine-3'-phosphate
  modified_base 3: mod_base = OTHER; note = guanosine-3'-phosphate
  modified_base 4: mod_base = OTHER; note = 2'-O-methyluridine-3'-phosphate
  modified_base 5: mod_base = OTHER; note = guanosine-3'-phosphate
  modified_base 6: mod_base = OTHER; note = guanosine-3'-phosphate
  modified_base 7: mod_base = OTHER; note = 2'-O-methyluridine-3'-phosphate
  modified_base 8: mod_base = OTHER; note = 2'-O-methyluridine-3'-phosphate
  modified_base 9: mod_base = OTHER; note = 2'-O-methyluridine-3'-phosphate
  modified_base 10: mod_base = OTHER; note = adenosine-3'-phosphate
  modified_base 11: mod_base = OTHER; note = guanosine-3'-phosphate
  modified_base 12: mod_base = OTHER; note = guanosine-3'-phosphate
  modified_base 13: mod_base = OTHER; note = guanosine-3'-phosphate
  modified_base 14: mod_base = OTHER; note = guanosine-3'-phosphate
  modified_base 15: mod_base = OTHER; note = 2'-O-methyluridine-3'-phosphate
  modified_base 16: mod_base = OTHER; note = 2'-O-methyluridine-3'-phosphate
  modified_base 17: mod_base = OTHER; note = 2'-O-methylcytidine-3'-phosphate
  modified_base 18: mod_base = OTHER; note = adenosine-3'-phosphate
  modified_base 19: mod_base = OTHER; note = 2'-O-methyluridine-3'-phosphate
  modified_base 20: mod_base = OTHER; note = 2'-deoxythymidine-3'-phosphorothioate
  misc_feature 1..19: note = RNA
  misc_feature 20..21: note = DNA
ctgtggtttaggggttcattt

SEQ ID NO: 786 - DNA, 21 bp, synthetic construct
  source 1..21: mol_type = other DNA
  modified_base 1: mod_base = OTHER; note = adenosine-3'-phosphate
  modified_base 2: mod_base = OTHER; note = uridine-3'-phosphate
  modified_base 3: mod_base = OTHER; note = guanosine-3'-phosphate
  modified_base 4: mod_base = OTHER; note = adenosine-3'-phosphate
  modified_base 5: mod_base = OTHER; note = adenosine-3'-phosphate
  modified_base 6: mod_base = OTHER; note = cytidine-3'-phosphate
  modified_base 7: mod_base = OTHER; note = cytidine-3'-phosphate
  modified_base 8: mod_base = OTHER; note = cytidine-3'-phosphate
  modified_base 9: mod_base = OTHER; note = cytidine-3'-phosphate
  modified_base 10: mod_base = OTHER; note = 2'-O-methyluridine-3'-phosphate
  modified_base 11: mod_base = OTHER; note = adenosine-3'-phosphate
  modified_base 12: mod_base = OTHER; note = adenosine-3'-phosphate
  modified_base 13: mod_base = OTHER; note = adenosine-3'-phosphate
  modified_base 14: mod_base = OTHER; note = cytidine-3'-phosphate
  modified_base 15: mod_base = OTHER; note = 2'-O-methylcytidine-3'-phosphate
  modified_base 16: mod_base = OTHER; note = adenosine-3'-phosphate
  modified_base 17: mod_base = OTHER; note = 2'-O-methylcytidine-3'-phosphate
  modified_base 18: mod_base = OTHER; note = adenosine-3'-phosphate
  modified_base 19: mod_base = OTHER; note = guanosine-3'-phosphate
  modified_base 20: mod_base = OTHER; note = 2'-deoxythymidine-3'-phosphorothioate
  misc_feature 1..19: note = RNA
  misc_feature 20..21: note = DNA
atgaacccctaaaccacagtt

SEQ ID NO: 787 - DNA, 21 bp, synthetic construct
  source 1..21: mol_type = other DNA
  modified_base 1: mod_base = OTHER; note = 2'-O-methyluridine-3'-phosphate
  modified_base 2: mod_base = OTHER; note = guanosine-3'-phosphate
  modified_base 3: mod_base = OTHER; note = guanosine-3'-phosphate
  modified_base 4: mod_base = OTHER; note = 2'-O-methyluridine-3'-phosphate
  modified_base 5: mod_base = OTHER; note = 2'-O-methyluridine-3'-phosphate
  modified_base 6: mod_base = OTHER; note = 2'-O-methyluridine-3'-phosphate
  modified_base 7: mod_base = OTHER; note = adenosine-3'-phosphate
  modified_base 8: mod_base = OTHER; note = guanosine-3'-phosphate
  modified_base 9: mod_base = OTHER; note = guanosine-3'-phosphate
  modified_base 10: mod_base = OTHER; note = guanosine-3'-phosphate
  modified_base 11: mod_base = OTHER; note = guanosine-3'-phosphate
  modified_base 12: mod_base = OTHER; note = 2'-O-methyluridine-3'-phosphate
  modified_base 13: mod_base = OTHER; note = 2'-O-methyluridine-3'-phosphate
  modified_base 14: mod_base = OTHER; note = 2'-O-methylcytidine-3'-phosphate
  modified_base 15: mod_base = OTHER; note = adenosine-3'-phosphate
  modified_base 16: mod_base = OTHER; note = 2'-O-methyluridine-3'-phosphate
  modified_base 17: mod_base = OTHER; note = 2'-O-methylcytidine-3'-phosphate
  modified_base 18: mod_base = OTHER; note = guanosine-3'-phosphate
  modified_base 19: mod_base = OTHER; note = guanosine-3'-phosphate
  modified_base 20: mod_base = OTHER; note = 2'-deoxythymidine-3'-phosphorothioate
  misc_feature 1..19: note = RNA
  misc_feature 20..21: note = DNA
tggtttaggggttcatcggtt

SEQ ID NO: 788 - DNA, 21 bp, synthetic construct
  source 1..21: mol_type = other DNA
  modified_base 1: mod_base = OTHER; note = cytidine-3'-phosphate
  modified_base 2: mod_base = OTHER; note = cytidine-3'-phosphate
  modified_base 3: mod_base = OTHER; note = guanosine-3'-phosphate
  modified_base 4: mod_base = OTHER; note = adenosine-3'-phosphate
  modified_base 5: mod_base = OTHER; note = uridine-3'-phosphate
  modified_base 6: mod_base = OTHER; note = guanosine-3'-phosphate
  modified_base 7: mod_base = OTHER; note = adenosine-3'-phosphate
  modified_base 8: mod_base = OTHER; note = adenosine-3'-phosphate
  modified_base 9: mod_base = OTHER; note = cytidine-3'-phosphate
  modified_base 10: mod_base = OTHER; note = cytidine-3'-phosphate
  modified_base 11: mod_base = OTHER; note = cytidine-3'-phosphate
  modified_base 12: mod_base = OTHER; note = cytidine-3'-phosphate
  modified_base 13: mod_base = OTHER; note = 2'-O-methyluridine-3'-phosphate
  modified_base 14: mod_base = OTHER; note = adenosine-3'-phosphate
  modified_base 15: mod_base = OTHER; note = adenosine-3'-phosphate
  modified_base 16: mod_base = OTHER; note = adenosine-3'-phosphate
  modified_base 17: mod_base = OTHER; note = cytidine-3'-phosphate
  modified_base 18: mod_base = OTHER; note = 2'-O-methylcytidine-3'-phosphate
  modified_base 19: mod_base = OTHER; note = adenosine-3'-phosphate
  modified_base 20: mod_base = OTHER; note = 2'-deoxythymidine-3'-phosphorothioate
  misc_feature 1..19: note = RNA
  misc_feature 20..21: note = DNA
ccgatgaacccctaaaccatt

SEQ ID NO: 789 - DNA, 21 bp, synthetic construct
  source 1..21: mol_type = other DNA
  modified_base 1: mod_base = OTHER; note = guanosine-3'-phosphate
  modified_base 2: mod_base = OTHER; note = guanosine-3'-phosphate
  modified_base 3: mod_base = OTHER; note = 2'-O-methyluridine-3'-phosphate
  modified_base 4: mod_base = OTHER; note = 2'-O-methyluridine-3'-phosphate
  modified_base 5: mod_base = OTHER; note = 2'-O-methyluridine-3'-phosphate
  modified_base 6: mod_base = OTHER; note = adenosine-3'-phosphate
  modified_base 7: mod_base = OTHER; note = guanosine-3'-phosphate
  modified_base 8: mod_base = OTHER; note = guanosine-3'-phosphate
  modified_base 9: mod_base = OTHER; note = guanosine-3'-phosphate
  modified_base 10: mod_base = OTHER; note = guanosine-3'-phosphate
  modified_base 11: mod_base = OTHER; note = 2'-O-methyluridine-3'-phosphate
  modified_base 12: mod_base = OTHER; note = 2'-O-methyluridine-3'-phosphate
  modified_base 13: mod_base = OTHER; note = 2'-O-methylcytidine-3'-phosphate
  modified_base 14: mod_base = OTHER; note = adenosine-3'-phosphate
  modified_base 15: mod_base = OTHER; note = 2'-O-methyluridine-3'-phosphate
  modified_base 16: mod_base = OTHER; note = 2'-O-methylcytidine-3'-phosphate
  modified_base 17: mod_base = OTHER; note = guanosine-3'-phosphate
  modified_base 18: mod_base = OTHER; note = guanosine-3'-phosphate
  modified_base 19: mod_base = OTHER; note = guanosine-3'-phosphate
  modified_base 20: mod_base = OTHER; note = 2'-deoxythymidine-3'-phosphorothioate
  misc_feature 1..19: note = RNA
  misc_feature 20..21: note = DNA
ggtttaggggttcatcgggtt

SEQ ID NO: 790 - DNA, 21 bp, synthetic construct
  source 1..21: mol_type = other DNA
  modified_base 1: mod_base = OTHER; note = cytidine-3'-phosphate
  modified_base 2: mod_base = OTHER; note = cytidine-3'-phosphate
  modified_base 3: mod_base = OTHER; note = cytidine-3'-phosphate
  modified_base 4: mod_base = OTHER; note = guanosine-3'-phosphate
  modified_base 5: mod_base = OTHER; note = adenosine-3'-phosphate
  modified_base 6: mod_base = OTHER; note = uridine-3'-phosphate
  modified_base 7: mod_base = OTHER; note = guanosine-3'-phosphate
  modified_base 8: mod_base = OTHER; note = adenosine-3'-phosphate
  modified_base 9: mod_base = OTHER; note = adenosine-3'-phosphate
  modified_base 10: mod_base = OTHER; note = cytidine-3'-phosphate
  modified_base 11: mod_base = OTHER; note = cytidine-3'-phosphate
  modified_base 12: mod_base = OTHER; note = cytidine-3'-phosphate
  modified_base 13: mod_base = OTHER; note = cytidine-3'-phosphate
  modified_base 14: mod_base = OTHER; note = 2'-O-methyluridine-3'-phosphate
  modified_base 15: mod_base = OTHER; note = adenosine-3'-phosphate
  modified_base 16: mod_base = OTHER; note = adenosine-3'-phosphate
  modified_base 17: mod_base = OTHER; note = adenosine-3'-phosphate
  modified_base 18: mod_base = OTHER; note = cytidine-3'-phosphate
  modified_base 19: mod_base = OTHER; note = cytidine-3'-phosphate
  modified_base 20: mod_base = OTHER; note = 2'-deoxythymidine-3'-phosphorothioate
  misc_feature 1..19: note = RNA
  misc_feature 20..21: note = DNA
cccgatgaacccctaaacctt

SEQ ID NO: 791 - DNA, 21 bp, synthetic construct
  source 1..21: mol_type = other DNA
  modified_base 1: mod_base = OTHER; note = adenosine-3'-phosphate
  modified_base 2: mod_base = OTHER; note = guanosine-3'-phosphate
  modified_base 3: mod_base = OTHER; note = guanosine-3'-phosphate
  modified_base 4: mod_base = OTHER; note = 2'-O-methylcytidine-3'-phosphate
  modified_base 5: mod_base = OTHER; note = adenosine-3'-phosphate
  modified_base 6: mod_base = OTHER; note = adenosine-3'-phosphate
  modified_base 7: mod_base = OTHER; note = 2'-O-methyluridine-3'-phosphate
  modified_base 8: mod_base = OTHER; note = guanosine-3'-phosphate
  modified_base 9: mod_base = OTHER; note = 2'-O-methyluridine-3'-phosphate
  modified_base 10: mod_base = OTHER; note = guanosine-3'-phosphate
  modified_base 11: mod_base = OTHER; note = guanosine-3'-phosphate
  modified_base 12: mod_base = OTHER; note = guanosine-3'-phosphate
  modified_base 13: mod_base = OTHER; note = adenosine-3'-phosphate
  modified_base 14: mod_base = OTHER; note = 2'-O-methylcytidine-3'-phosphate
  modified_base 15: mod_base = OTHER; note = 2'-O-methyluridine-3'-phosphate
  modified_base 16: mod_base = OTHER; note = 2'-O-methyluridine-3'-phosphate
  modified_base 17: mod_base = OTHER; note = adenosine-3'-phosphate
  modified_base 18: mod_base = OTHER; note = adenosine-3'-phosphate
  modified_base 19: mod_base = OTHER; note = adenosine-3'-phosphate
  modified_base 20: mod_base = OTHER; note = 2'-deoxythymidine-3'-phosphorothioate
  misc_feature 1..19: note = RNA
  misc_feature 20..21: note = DNA
aggcaatgtgggacttaaatt

SEQ ID NO: 792 - DNA, 21 bp, synthetic construct
  source 1..21: mol_type = other DNA
  modified_base 1: mod_base = OTHER; note = uridine-3'-phosphate
  modified_base 2: mod_base = OTHER; note = uridine-3'-phosphate
  modified_base 3: mod_base = OTHER; note = 2'-O-methyluridine-3'-phosphate
  modified_base 4: mod_base = OTHER; note = adenosine-3'-phosphate
  modified_base 5: mod_base = OTHER; note = adenosine-3'-phosphate
  modified_base 6: mod_base = OTHER; note = guanosine-3'-phosphate
  modified_base 7: mod_base = OTHER; note = uridine-3'-phosphate
  modified_base 8: mod_base = OTHER; note = cytidine-3'-phosphate
  modified_base 9: mod_base = OTHER; note = cytidine-3'-phosphate
  modified_base 10: mod_base = OTHER; note = 2'-O-methylcytidine-3'-phosphate
  modified_base 11: mod_base = OTHER; note = adenosine-3'-phosphate
  modified_base 12: mod_base = OTHER; note = 2'-O-methylcytidine-3'-phosphate
  modified_base 13: mod_base = OTHER; note = adenosine-3'-phosphate
  modified_base 14: mod_base = OTHER; note = uridine-3'-phosphate
  modified_base 15: mod_base = OTHER; note = uridine-3'-phosphate
  modified_base 16: mod_base = OTHER; note = guanosine-3'-phosphate
  modified_base 17: mod_base = OTHER; note = cytidine-3'-phosphate
  modified_base 18: mod_base = OTHER; note = cytidine-3'-phosphate
  modified_base 19: mod_base = OTHER; note = uridine-3'-phosphate
  modified_base 20: mod_base = OTHER; note = 2'-deoxythymidine-3'-phosphorothioate
  misc_feature 1..19: note = RNA
  misc_feature 20..21: note = DNA
tttaagtcccacattgccttt

SEQ ID NO: 793 - DNA, 21 bp, synthetic construct
  source 1..21: mol_type = other DNA
  modified_base 1: mod_base = OTHER; note = guanosine-3'-phosphate
  modified_base 2: mod_base = OTHER; note = guanosine-3'-phosphate
  modified_base 3: mod_base = OTHER; note = 2'-O-methylcytidine-3'-phosphate
  modified_base 4: mod_base = OTHER; note = adenosine-3'-phosphate
  modified_base 5: mod_base = OTHER; note = adenosine-3'-phosphate
  modified_base 6: mod_base = OTHER; note = 2'-O-methyluridine-3'-phosphate
  modified_base 7: mod_base = OTHER; note = guanosine-3'-phosphate
  modified_base 8: mod_base = OTHER; note = 2'-O-methyluridine-3'-phosphate
  modified_base 9: mod_base = OTHER; note = guanosine-3'-phosphate
  modified_base 10: mod_base = OTHER; note = guanosine-3'-phosphate
  modified_base 11: mod_base = OTHER; note = guanosine-3'-phosphate
  modified_base 12: mod_base = OTHER; note = adenosine-3'-phosphate
  modified_base 13: mod_base = OTHER; note = 2'-O-methylcytidine-3'-phosphate
  modified_base 14: mod_base = OTHER; note = 2'-O-methyluridine-3'-phosphate
  modified_base 15: mod_base = OTHER; note = 2'-O-methyluridine-3'-phosphate
  modified_base 16: mod_base = OTHER; note = adenosine-3'-phosphate
  modified_base 17: mod_base = OTHER; note = adenosine-3'-phosphate
  modified_base 18: mod_base = OTHER; note = adenosine-3'-phosphate
  modified_base 19: mod_base = OTHER; note = adenosine-3'-phosphate
  modified_base 20: mod_base = OTHER; note = 2'-deoxythymidine-3'-phosphorothioate
  misc_feature 1..19: note = RNA
  misc_feature 20..21: note = DNA
ggcaatgtgggacttaaaatt

SEQ ID NO: 794 - DNA, 21 bp, synthetic construct
  source 1..21: mol_type = other DNA
  modified_base 1: mod_base = OTHER; note = uridine-3'-phosphate
  modified_base 2: mod_base = OTHER; note = uridine-3'-phosphate
  modified_base 3: mod_base = OTHER; note = uridine-3'-phosphate
  modified_base 4: mod_base = OTHER; note = 2'-O-methyluridine-3'-phosphate
  modified_base 5: mod_base = OTHER; note = adenosine-3'-phosphate
  modified_base 6: mod_base = OTHER; note = adenosine-3'-phosphate
  modified_base 7: mod_base = OTHER; note = guanosine-3'-phosphate
  modified_base 8: mod_base = OTHER; note = uridine-3'-phosphate
  modified_base 9: mod_base = OTHER; note = cytidine-3'-phosphate
  modified_base 10: mod_base = OTHER; note = cytidine-3'-phosphate
  modified_base 11: mod_base = OTHER; note = 2'-O-methylcytidine-3'-phosphate
  modified_base 12: mod_base = OTHER; note = adenosine-3'-phosphate
  modified_base 13: mod_base = OTHER; note = 2'-O-methylcytidine-3'-phosphate
  modified_base 14: mod_base = OTHER; note = adenosine-3'-phosphate
  modified_base 15: mod_base = OTHER; note = uridine-3'-phosphate
  modified_base 16: mod_base = OTHER; note = uridine-3'-phosphate
  modified_base 17: mod_base = OTHER; note = guanosine-3'-phosphate
  modified_base 18: mod_base = OTHER; note = cytidine-3'-phosphate
  modified_base 19: mod_base = OTHER; note = cytidine-3'-phosphate
  modified_base 20: mod_base = OTHER; note = 2'-deoxythymidine-3'-phosphorothioate
  misc_feature 1..19: note = RNA
  misc_feature 20..21: note = DNA
ttttaagtcccacattgcctt

SEQ ID NO: 795 - DNA, 21 bp, synthetic construct
  source 1..21: mol_type = other DNA
  modified_base 1: mod_base = OTHER; note = guanosine-3'-phosphate
  modified_base 2: mod_base = OTHER; note = 2'-O-methylcytidine-3'-phosphate
  modified_base 3: mod_base = OTHER; note = adenosine-3'-phosphate
  modified_base 4: mod_base = OTHER; note = adenosine-3'-phosphate
  modified_base 5: mod_base = OTHER; note = 2'-O-methyluridine-3'-phosphate
  modified_base 6: mod_base = OTHER; note = guanosine-3'-phosphate
  modified_base 7: mod_base = OTHER; note = 2'-O-methyluridine-3'-phosphate
  modified_base 8: mod_base = OTHER; note = guanosine-3'-phosphate
  modified_base 9: mod_base = OTHER; note = guanosine-3'-phosphate
  modified_base 10: mod_base = OTHER; note = guanosine-3'-phosphate
  modified_base 11: mod_base = OTHER; note = adenosine-3'-phosphate
  modified_base 12: mod_base = OTHER; note = 2'-O-methylcytidine-3'-phosphate
  modified_base 13: mod_base = OTHER; note = 2'-O-methyluridine-3'-phosphate
  modified_base 14: mod_base = OTHER; note = 2'-O-methyluridine-3'-phosphate
  modified_base 15: mod_base = OTHER; note = adenosine-3'-phosphate
  modified_base 16: mod_base = OTHER; note = adenosine-3'-phosphate
  modified_base 17: mod_base = OTHER; note = adenosine-3'-phosphate
  modified_base 18: mod_base = OTHER; note = adenosine-3'-phosphate
  modified_base 19: mod_base = OTHER; note = guanosine-3'-phosphate
  modified_base 20: mod_base = OTHER; note = 2'-deoxythymidine-3'-phosphorothioate
  misc_feature 1..19: note = RNA
  misc_feature 20..21: note = DNA
gcaatgtgggacttaaaagtt

SEQ ID NO: 796 - DNA, 21 bp, synthetic construct
  source 1..21: mol_type = other DNA
  modified_base 1: mod_base = OTHER; note = cytidine-3'-phosphate
  modified_base 2: mod_base = OTHER; note = uridine-3'-phosphate
  modified_base 3: mod_base = OTHER; note = uridine-3'-phosphate
  modified_base 4: mod_base = OTHER; note = uridine-3'-phosphate
  modified_base 5: mod_base = OTHER; note = 2'-O-methyluridine-3'-phosphate
  modified_base 6: mod_base = OTHER; note = adenosine-3'-phosphate
  modified_base 7: mod_base = OTHER; note = adenosine-3'-phosphate
  modified_base 8: mod_base = OTHER; note = guanosine-3'-phosphate
  modified_base 9: mod_base = OTHER; note = uridine-3'-phosphate
  modified_base 10: mod_base = OTHER; note = cytidine-3'-phosphate
  modified_base 11: mod_base = OTHER; note = cytidine-3'-phosphate
  modified_base 12: mod_base = OTHER; note = 2'-O-methylcytidine-3'-phosphate
  modified_base 13: mod_base = OTHER; note = adenosine-3'-phosphate
  modified_base 14: mod_base = OTHER; note = 2'-O-methylcytidine-3'-phosphate
  modified_base 15: mod_base = OTHER; note = adenosine-3'-phosphate
  modified_base 16: mod_base = OTHER; note = uridine-3'-phosphate
  modified_base 17: mod_base = OTHER; note = uridine-3'-phosphate
  modified_base 18: mod_base = OTHER; note = guanosine-3'-phosphate
  modified_base 19: mod_base = OTHER; note = cytidine-3'-phosphate
  modified_base 20: mod_base = OTHER; note = 2'-deoxythymidine-3'-phosphorothioate
  misc_feature 1..19: note = RNA
  misc_feature 20..21: note = DNA
cttttaagtcccacattgctt

SEQ ID NO: 797 - DNA, 21 bp, synthetic construct
  source 1..21: mol_type = other DNA
  modified_base 1: mod_base = OTHER; note = 2'-O-methyluridine-3'-phosphate
  modified_base 2: mod_base = OTHER; note = guanosine-3'-phosphate
  modified_base 3: mod_base = OTHER; note = adenosine-3'-phosphate
  modified_base 4: mod_base = OTHER; note = adenosine-3'-phosphate
  modified_base 5: mod_base = OTHER; note = adenosine-3'-phosphate
  modified_base 6: mod_base = OTHER; note = adenosine-3'-phosphate
  modified_base 7: mod_base = OTHER; note = 2'-O-methyluridine-3'-phosphate
  modified_base 8: mod_base = OTHER; note = guanosine-3'-phosphate
  modified_base 9: mod_base = OTHER; note = guanosine-3'-phosphate
  modified_base 10: mod_base = OTHER; note = adenosine-3'-phosphate
  modified_base 11: mod_base = OTHER; note = adenosine-3'-phosphate
  modified_base 12: mod_base = OTHER; note = 2'-O-methylcytidine-3'-phosphate
  modified_base 13: mod_base = OTHER; note = 2'-O-methylcytidine-3'-phosphate
  modified_base 14: mod_base = OTHER; note = 2'-O-methyluridine-3'-phosphate
  modified_base 15: mod_base = OTHER; note = guanosine-3'-phosphate
  modified_base 16: mod_base = OTHER; note = guanosine-3'-phosphate
  modified_base 17: mod_base = OTHER; note = 2'-O-methylcytidine-3'-phosphate
  modified_base 18: mod_base = OTHER; note = guanosine-3'-phosphate
  modified_base 19: mod_base = OTHER; note = adenosine-3'-phosphate
  modified_base 20: mod_base = OTHER; note = 2'-deoxythymidine-3'-phosphorothioate
  misc_feature 1..19: note = RNA
  misc_feature 20..21: note = DNA
tgaaaatggaacctggcgatt

SEQ ID NO: 798 - DNA, 21 bp, synthetic construct
  source 1..21: mol_type = other DNA
  modified_base 1: mod_base = OTHER; note = uridine-3'-phosphate
  modified_base 2: mod_base = OTHER; note = cytidine-3'-phosphate
  modified_base 3: mod_base = OTHER; note = guanosine-3'-phosphate
  modified_base 4: mod_base = OTHER; note = cytidine-3'-phosphate
  modified_base 5: mod_base = OTHER; note = 2'-O-methylcytidine-3'-phosphate
  modified_base 6: mod_base = OTHER; note = adenosine-3'-phosphate
  modified_base 7: mod_base = OTHER; note = guanosine-3'-phosphate
  modified_base 8: mod_base = OTHER; note = guanosine-3'-phosphate
  modified_base 9: mod_base = OTHER; note = uridine-3'-phosphate
  modified_base 10: mod_base = OTHER; note = uridine-3'-phosphate
  modified_base 11: mod_base = OTHER; note = cytidine-3'-phosphate
  modified_base 12: mod_base = OTHER; note = 2'-O-methylcytidine-3'-phosphate
  modified_base 13: mod_base = OTHER; note = adenosine-3'-phosphate
  modified_base 14: mod_base = OTHER; note = uridine-3'-phosphate
  modified_base 15: mod_base = OTHER; note = uridine-3'-phosphate
  modified_base 16: mod_base = OTHER; note = uridine-3'-phosphate
  modified_base 17: mod_base = OTHER; note = uridine-3'-phosphate
  modified_base 18: mod_base = OTHER; note = 2'-O-methylcytidine-3'-phosphate
  modified_base 19: mod_base = OTHER; note = adenosine-3'-phosphate
  modified_base 20: mod_base = OTHER; note = 2'-deoxythymidine-3'-phosphorothioate
  misc_feature 1..19: note = RNA
  misc_feature 20..21: note = DNA
tcgccaggttccattttcatt

SEQ ID NO: 799 - DNA, 21 bp, synthetic construct
  source 1..21: mol_type = other DNA
  modified_base 1: mod_base = OTHER; note = adenosine-3'-phosphate
  modified_base 2: mod_base = OTHER; note = adenosine-3'-phosphate
  modified_base 3: mod_base = OTHER; note = adenosine-3'-phosphate
  modified_base 4: mod_base = OTHER; note = adenosine-3'-phosphate
  modified_base 5: mod_base = OTHER; note = 2'-O-methyluridine-3'-phosphate
  modified_base 6: mod_base = OTHER; note = guanosine-3'-phosphate
  modified_base 7: mod_base = OTHER; note = guanosine-3'-phosphate
  modified_base 8: mod_base = OTHER; note = adenosine-3'-phosphate
  modified_base 9: mod_base = OTHER; note = adenosine-3'-phosphate
  modified_base 10: mod_base = OTHER; note = 2'-O-methylcytidine-3'-phosphate
  modified_base 11: mod_base = OTHER; note = 2'-O-methylcytidine-3'-phosphate
  modified_base 12: mod_base = OTHER; note = 2'-O-methyluridine-3'-phosphate
  modified_base 13: mod_base = OTHER; note = guanosine-3'-phosphate
  modified_base 14: mod_base = OTHER; note = guanosine-3'-phosphate
  modified_base 15: mod_base = OTHER; note = 2'-O-methylcytidine-3'-phosphate
  modified_base 16: mod_base = OTHER; note = guanosine-3'-phosphate
  modified_base 17: mod_base = OTHER; note = adenosine-3'-phosphate
  modified_base 18: mod_base = OTHER; note = adenosine-3'-phosphate
  modified_base 19: mod_base = OTHER; note = adenosine-3'-phosphate
  modified_base 20: mod_base = OTHER; note = 2'-deoxythymidine-3'-phosphorothioate
  misc_feature 1..19: note = RNA
  misc_feature 20..21: note = DNA
aaaatggaacctggcgaaatt

SEQ ID NO: 800 - DNA, 21 bp, synthetic construct
  source 1..21: mol_type = other DNA
  modified_base 1: mod_base = OTHER; note = uridine-3'-phosphate
  modified_base 2: mod_base = OTHER; note = uridine-3'-phosphate
  modified_base 3: mod_base = OTHER; note = uridine-3'-phosphate
  modified_base 4: mod_base = OTHER; note = cytidine-3'-phosphate
  modified_base 5: mod_base = OTHER; note = guanosine-3'-phosphate
  modified_base 6: mod_base = OTHER; note = cytidine-3'-phosphate
  modified_base 7: mod_base = OTHER; note = 2'-O-methylcytidine-3'-phosphate
  modified_base 8: mod_base = OTHER; note = adenosine-3'-phosphate
  modified_base 9: mod_base = OTHER; note = guanosine-3'-phosphate
  modified_base 10: mod_base = OTHER; note = guanosine-3'-phosphate
  modified_base 11: mod_base = OTHER; note = uridine-3'-phosphate
  modified_base 12: mod_base = OTHER; note = uridine-3'-phosphate
  modified_base 13: mod_base = OTHER; note = cytidine-3'-phosphate
  modified_base 14: mod_base = OTHER; note = 2'-O-methylcytidine-3'-phosphate
  modified_base 15: mod_base = OTHER; note = adenosine-3'-phosphate
  modified_base 16: mod_base = OTHER; note = uridine-3'-phosphate
  modified_base 17: mod_base = OTHER; note = uridine-3'-phosphate
  modified_base 18: mod_base = OTHER; note = uridine-3'-phosphate
  modified_base 19: mod_base = OTHER; note = uridine-3'-phosphate
  modified_base 20: mod_base = OTHER; note = 2'-deoxythymidine-3'-phosphorothioate
  misc_feature 1..19: note = RNA
  misc_feature 20..21: note = DNA
tttcgccaggttccatttttt

SEQ ID NO: 801 - DNA, 21 bp, synthetic construct
  source 1..21: mol_type = other DNA
  modified_base 1: mod_base = OTHER; note = guanosine-3'-phosphate
  modified_base 2: mod_base = OTHER; note = adenosine-3'-phosphate
  modified_base 3: mod_base = OTHER; note = guanosine-3'-phosphate
  modified_base 4: mod_base = OTHER; note = guanosine-3'-phosphate
  modified_base 5: mod_base = OTHER; note = guanosine-3'-phosphate
  modified_base 6: mod_base = OTHER; note = adenosine-3'-phosphate
  modified_base 7: mod_base = OTHER; note = guanosine-3'-phosphate
  modified_base 8: mod_base = OTHER; note = adenosine-3'-phosphate
  modified_base 9: mod_base = OTHER; note = 2'-O-methylcytidine-3'-phosphate
  modified_base 10: mod_base = OTHER; note = 2'-O-methylcytidine-3'-phosphate
  modified_base 11: mod_base = OTHER; note = 2'-O-methyluridine-3'-phosphate
  modified_base 12: mod_base = OTHER; note = 2'-O-methyluridine-3'-phosphate
  modified_base 13: mod_base = OTHER; note = guanosine-3'-phosphate
  modified_base 14: mod_base = OTHER; note = adenosine-3'-phosphate
  modified_base 15: mod_base = OTHER; note = 2'-O-methyluridine-3'-phosphate
  modified_base 16: mod_base = OTHER; note = adenosine-3'-phosphate
  modified_base 17: mod_base = OTHER; note = 2'-O-methylcytidine-3'-phosphate
  modified_base 18: mod_base = OTHER; note = 2'-O-methyluridine-3'-phosphate
  modified_base 19: mod_base = OTHER; note = 2'-O-methyluridine-3'-phosphate
  modified_base 20: mod_base = OTHER; note = 2'-deoxythymidine-3'-phosphorothioate
  misc_feature 1..19: note = RNA
  misc_feature 20..21: note = DNA
gagggagaccttgatactttt

SEQ ID NO: 802 - DNA, 21 bp, synthetic construct
  source 1..21: mol_type = other DNA
  modified_base 1: mod_base = OTHER; note = adenosine-3'-phosphate
  modified_base 2: mod_base = OTHER; note = adenosine-3'-phosphate
  modified_base 3: mod_base = OTHER; note = guanosine-3'-phosphate
  modified_base 4: mod_base = OTHER; note = 2'-O-methyluridine-3'-phosphate
  modified_base 5: mod_base = OTHER; note = adenosine-3'-phosphate
  modified_base 6: mod_base = OTHER; note = uridine-3'-phosphate
  modified_base 7: mod_base = OTHER; note = 2'-O-methylcytidine-3'-phosphate
  modified_base 8: mod_base = OTHER; note = adenosine-3'-phosphate
  modified_base 9: mod_base = OTHER; note = adenosine-3'-phosphate
  modified_base 10: mod_base = OTHER; note = guanosine-3'-phosphate
  modified_base 11: mod_base = OTHER; note = guanosine-3'-phosphate
  modified_base 12: mod_base = OTHER; note = uridine-3'-phosphate
  modified_base 13: mod_base = OTHER; note = cytidine-3'-phosphate
  modified_base 14: mod_base = OTHER; note = uridine-3'-phosphate
  modified_base 15: mod_base = OTHER; note = cytidine-3'-phosphate
  modified_base 16: mod_base = OTHER; note = cytidine-3'-phosphate
  modified_base 17: mod_base = OTHER; note = cytidine-3'-phosphate
  modified_base 18: mod_base = OTHER; note = uridine-3'-phosphate
  modified_base 19: mod_base = OTHER; note = cytidine-3'-phosphate
  modified_base 20: mod_base = OTHER; note = 2'-deoxythymidine-3'-phosphorothioate
  misc_feature 1..19: note = RNA
  misc_feature 20..21: note = DNA
aagtatcaaggtctccctctt

SEQ ID NO: 803 - DNA, 21 bp, synthetic construct
  source 1..21: mol_type = other DNA
  modified_base 1: mod_base = OTHER; note = adenosine-3'-phosphate
  modified_base 2: mod_base = OTHER; note = guanosine-3'-phosphate
  modified_base 3: mod_base = OTHER; note = guanosine-3'-phosphate
  modified_base 4: mod_base = OTHER; note = guanosine-3'-phosphate
  modified_base 5: mod_base = OTHER; note = adenosine-3'-phosphate
  modified_base 6: mod_base = OTHER; note = guanosine-3'-phosphate
  modified_base 7: mod_base = OTHER; note = adenosine-3'-phosphate
  modified_base 8: mod_base = OTHER; note = 2'-O-methylcytidine-3'-phosphate
  modified_base 9: mod_base = OTHER; note = 2'-O-methylcytidine-3'-phosphate
  modified_base 10: mod_base = OTHER; note = 2'-O-methyluridine-3'-phosphate
  modified_base 11: mod_base = OTHER; note = 2'-O-methyluridine-3'-phosphate
  modified_base 12: mod_base = OTHER; note = guanosine-3'-phosphate
  modified_base 13: mod_base = OTHER; note = adenosine-3'-phosphate
  modified_base 14: mod_base = OTHER; note = 2'-O-methyluridine-3'-phosphate
  modified_base 15: mod_base = OTHER; note = adenosine-3'-phosphate
  modified_base 16: mod_base = OTHER; note = 2'-O-methylcytidine-3'-phosphate
  modified_base 17: mod_base = OTHER; note = 2'-O-methyluridine-3'-phosphate
  modified_base 18: mod_base = OTHER; note = 2'-O-methyluridine-3'-phosphate
  modified_base 19: mod_base = OTHER; note = 2'-O-methyluridine-3'-phosphate
  modified_base 20: mod_base = OTHER; note = 2'-deoxythymidine-3'-phosphorothioate
  misc_feature 1..19: note = RNA
  misc_feature 20..21: note = DNA
agggagaccttgatacttttt

SEQ ID NO: 804 - DNA, 21 bp, synthetic construct
  source 1..21: mol_type = other DNA
  modified_base 1: mod_base = OTHER; note = adenosine-3'-phosphate
  modified_base 2: mod_base = OTHER; note = adenosine-3'-phosphate
  modified_base 3: mod_base = OTHER; note = adenosine-3'-phosphate
  modified_base 4: mod_base = OTHER; note = guanosine-3'-phosphate
  modified_base 5: mod_base = OTHER; note = 2'-O-methyluridine-3'-phosphate
  modified_base 6: mod_base = OTHER; note = adenosine-3'-phosphate
  modified_base 7: mod_base = OTHER; note = uridine-3'-phosphate
  modified_base 8: mod_base = OTHER; note = 2'-O-methylcytidine-3'-phosphate
  modified_base 9: mod_base = OTHER; note = adenosine-3'-phosphate
  modified_base 10: mod_base = OTHER; note = adenosine-3'-phosphate
  modified_base 11: mod_base = OTHER; note = guanosine-3'-phosphate
  modified_base 12: mod_base = OTHER; note = guanosine-3'-phosphate
  modified_base 13: mod_base = OTHER; note = uridine-3'-phosphate
  modified_base 14: mod_base = OTHER; note = cytidine-3'-phosphate
  modified_base 15: mod_base = OTHER; note = uridine-3'-phosphate
  modified_base 16: mod_base = OTHER; note = cytidine-3'-phosphate
  modified_base 17: mod_base = OTHER; note = cytidine-3'-phosphate
  modified_base 18: mod_base = OTHER; note = cytidine-3'-phosphate
  modified_base 19: mod_base = OTHER; note = uridine-3'-phosphate
  modified_base 20: mod_base = OTHER; note = 2'-deoxythymidine-3'-phosphorothioate
  misc_feature 1..19: note = RNA
  misc_feature 20..21: note = DNA
aaagtatcaaggtctcccttt

SEQ ID NO: 805 - DNA, 21 bp, synthetic construct
  source 1..21: mol_type = other DNA
  modified_base 1: mod_base = OTHER; note = adenosine-3'-phosphate
  modified_base 2: mod_base = OTHER; note = guanosine-3'-phosphate
  modified_base 3: mod_base = OTHER; note = adenosine-3'-phosphate
  modified_base 4: mod_base = OTHER; note = 2'-O-methylcytidine-3'-phosphate
  modified_base 5: mod_base = OTHER; note = 2'-O-methylcytidine-3'-phosphate
  modified_base 6: mod_base = OTHER; note = 2'-O-methyluridine-3'-phosphate
  modified_base 7: mod_base = OTHER; note = 2'-O-methyluridine-3'-phosphate
  modified_base 8: mod_base = OTHER; note = guanosine-3'-phosphate
  modified_base 9: mod_base = OTHER; note = adenosine-3'-phosphate
  modified_base 10: mod_base = OTHER; note = 2'-O-methyluridine-3'-phosphate
  modified_base 11: mod_base = OTHER; note = adenosine-3'-phosphate
  modified_base 12: mod_base = OTHER; note = 2'-O-methylcytidine-3'-phosphate
  modified_base 13: mod_base = OTHER; note = 2'-O-methyluridine-3'-phosphate
  modified_base 14: mod_base = OTHER; note = 2'-O-methyluridine-3'-phosphate
  modified_base 15: mod_base = OTHER; note = 2'-O-methyluridine-3'-phosphate
  modified_base 16: mod_base = OTHER; note = 2'-O-methylcytidine-3'-phosphate
  modified_base 17: mod_base = OTHER; note = adenosine-3'-phosphate
  modified_base 18: mod_base = OTHER; note = adenosine-3'-phosphate
  modified_base 19: mod_base = OTHER; note = adenosine-3'-phosphate
  modified_base 20: mod_base = OTHER; note = 2'-deoxythymidine-3'-phosphorothioate
  misc_feature 1..19: note = RNA
  misc_feature 20..21: note = DNA
agaccttgatactttcaaatt

SEQ ID NO: 806 - DNA, 21 bp, synthetic construct
  source 1..21: mol_type = other DNA
  modified_base 1: mod_base = OTHER; note = uridine-3'-phosphate
  modified_base 2: mod_base = OTHER; note = uridine-3'-phosphate
  modified_base 3: mod_base = OTHER; note = uridine-3'-phosphate
  modified_base 4: mod_base = OTHER; note = guanosine-3'-phosphate
  modified_base 5: mod_base = OTHER; note = adenosine-3'-phosphate
  modified_base 6: mod_base = OTHER; note = adenosine-3'-phosphate
  modified_base 7: mod_base = OTHER; note = adenosine-3'-phosphate
  modified_base 8: mod_base = OTHER; note = guanosine-3'-phosphate
  modified_base 9: mod_base = OTHER; note = 2'-O-methyluridine-3'-phosphate
  modified_base 10: mod_base = OTHER; note = adenosine-3'-phosphate
  modified_base 11: mod_base = OTHER; note = uridine-3'-phosphate
  modified_base 12: mod_base = OTHER; note = 2'-O-methylcytidine-3'-phosphate
  modified_base 13: mod_base = OTHER; note = adenosine-3'-phosphate
  modified_base 14: mod_base = OTHER; note = adenosine-3'-phosphate
  modified_base 15: mod_base = OTHER; note = guanosine-3'-phosphate
  modified_base 16: mod_base = OTHER; note = guanosine-3'-phosphate
  modified_base 17: mod_base = OTHER; note = uridine-3'-phosphate
  modified_base 18: mod_base = OTHER; note = cytidine-3'-phosphate
  modified_base 19: mod_base = OTHER; note = uridine-3'-phosphate
  modified_base 20: mod_base = OTHER; note = 2'-deoxythymidine-3'-phosphorothioate
  misc_feature 1..19: note = RNA
  misc_feature 20..21: note = DNA
tttgaaagtatcaaggtcttt

SEQ ID NO: 807 - DNA, 21 bp, synthetic construct
  source 1..21: mol_type = other DNA
  modified_base 1: mod_base = OTHER; note = 2'-O-methyluridine-3'-phosphate
  modified_base 2: mod_base = OTHER; note = 2'-O-methyluridine-3'-phosphate
  modified_base 3: mod_base = OTHER; note = guanosine-3'-phosphate
  modified_base 4: mod_base = OTHER; note = adenosine-3'-phosphate
  modified_base 5: mod_base = OTHER; note = 2'-O-methyluridine-3'-phosphate
  modified_base 6: mod_base = OTHER; note = adenosine-3'-phosphate
  modified_base 7: mod_base = OTHER; note = 2'-O-methylcytidine-3'-phosphate
  modified_base 8: mod_base = OTHER; note = 2'-O-methyluridine-3'-phosphate
  modified_base 9: mod_base = OTHER; note = 2'-O-methyluridine-3'-phosphate
  modified_base 10: mod_base = OTHER; note = 2'-O-methyluridine-3'-phosphate
  modified_base 11: mod_base = OTHER; note = 2'-O-methylcytidine-3'-phosphate
  modified_base 12: mod_base = OTHER; note = adenosine-3'-phosphate
  modified_base 13: mod_base = OTHER; note = adenosine-3'-phosphate
  modified_base 14: mod_base = OTHER; note = adenosine-3'-phosphate
  modified_base 15: mod_base = OTHER; note = 2'-O-methyluridine-3'-phosphate
  modified_base 16: mod_base = OTHER; note = guanosine-3'-phosphate
  modified_base 17: mod_base = OTHER; note = 2'-O-methylcytidine-3'-phosphate
  modified_base 18: mod_base = OTHER; note = 2'-O-methylcytidine-3'-phosphate
  modified_base 19: mod_base = OTHER; note = 2'-O-methyluridine-3'-phosphate
  modified_base 20: mod_base = OTHER; note = 2'-deoxythymidine-3'-phosphorothioate
  misc_feature 1..19: note = RNA
  misc_feature 20..21: note = DNA
ttgatactttcaaatgccttt

SEQ ID NO: 808 - DNA, 21 bp, synthetic construct
  source 1..21: mol_type = other DNA
  modified_base 1: mod_base = OTHER; note = adenosine-3'-phosphate
  modified_base 2: mod_base = OTHER; note = guanosine-3'-phosphate
  modified_base 3: mod_base = OTHER; note = guanosine-3'-phosphate
  modified_base 4: mod_base = OTHER; note = 2'-O-methylcytidine-3'-phosphate
  modified_base 5: mod_base = OTHER; note = adenosine-3'-phosphate
  modified_base 6: mod_base = OTHER; note = uridine-3'-phosphate
  modified_base 7: mod_base = OTHER; note = uridine-3'-phosphate
  modified_base 8: mod_base = OTHER; note = uridine-3'-phosphate
  modified_base 9: mod_base = OTHER; note = guanosine-3'-phosphate
  modified_base 10: mod_base = OTHER; note = adenosine-3'-phosphate
  modified_base 11: mod_base = OTHER; note = adenosine-3'-phosphate
  modified_base 12: mod_base = OTHER; note = adenosine-3'-phosphate
  modified_base 13: mod_base = OTHER; note = guanosine-3'-phosphate
  modified_base 14: mod_base = OTHER; note = 2'-O-methyluridine-3'-phosphate
  modified_base 15: mod_base = OTHER; note = adenosine-3'-phosphate
  modified_base 16: mod_base = OTHER; note = uridine-3'-phosphate
  modified_base 17: mod_base = OTHER; note = 2'-O-methylcytidine-3'-phosphate
  modified_base 18: mod_base = OTHER; note = adenosine-3'-phosphate
  modified_base 19: mod_base = OTHER; note = adenosine-3'-phosphate
  modified_base 20: mod_base = OTHER; note = 2'-deoxythymidine-3'-phosphorothioate
  misc_feature 1..19: note = RNA
  misc_feature 20..21: note = DNA
aggcatttgaaagtatcaatt

SEQ ID NO: 809 - DNA, 21 bp, synthetic construct
  source 1..21: mol_type = other DNA
  modified_base 1: mod_base = OTHER; note = adenosine-3'-phosphate
  modified_base 2: mod_base = OTHER; note = adenosine-3'-phosphate
  modified_base 3: mod_base = OTHER; note = 2'-O-methyluridine-3'-phosphate
  modified_base 4: mod_base = OTHER; note = guanosine-3'-phosphate
  modified_base 5: mod_base = OTHER; note = 2'-O-methylcytidine-3'-phosphate
  modified_base 6: mod_base = OTHER; note = 2'-O-methylcytidine-3'-phosphate
  modified_base 7: mod_base = OTHER; note = 2'-O-methyluridine-3'-phosphate
  modified_base 8: mod_base = OTHER; note = guanosine-3'-phosphate
  modified_base 9: mod_base = OTHER; note = adenosine-3'-phosphate
  modified_base 10: mod_base = OTHER; note = guanosine-3'-phosphate
  modified_base 11: mod_base = OTHER; note = guanosine-3'-phosphate
  modified_base 12: mod_base = OTHER; note = guanosine-3'-phosphate
  modified_base 13: mod_base = OTHER; note = guanosine-3'-phosphate
  modified_base 14: mod_base = OTHER; note = 2'-O-methylcytidine-3'-phosphate
  modified_base 15: mod_base = OTHER; note = 2'-O-methyluridine-3'-phosphate
  modified_base 16: mod_base = OTHER; note = 2'-O-methylcytidine-3'-phosphate
  modified_base 17: mod_base = OTHER; note = adenosine-3'-phosphate
  modified_base 18: mod_base = OTHER; note = 2'-O-methyluridine-3'-phosphate
  modified_base 19: mod_base = OTHER; note = 2'-O-methylcytidine-3'-phosphate
  modified_base 20: mod_base = OTHER; note = 2'-deoxythymidine-3'-phosphorothioate
  misc_feature 1..19: note = RNA
  misc_feature 20..21: note = DNA
aatgcctgaggggctcatctt

SEQ ID NO: 810 - DNA, 21 bp, synthetic construct
  source 1..21: mol_type = other DNA
  modified_base 1: mod_base = OTHER; note = guanosine-3'-phosphate
  modified_base 2: mod_base = OTHER; note = adenosine-3'-phosphate
  modified_base 3: mod_base = OTHER; note = uridine-3'-phosphate
  modified_base 4: mod_base = OTHER; note = guanosine-3'-phosphate
  modified_base 5: mod_base = OTHER; note = adenosine-3'-phosphate
  modified_base 6: mod_base = OTHER; note = guanosine-3'-phosphate
  modified_base 7: mod_base = OTHER; note = cytidine-3'-phosphate
  modified_base 8: mod_base = OTHER; note = cytidine-3'-phosphate
  modified_base 9: mod_base = OTHER; note = cytidine-3'-phosphate
  modified_base 10: mod_base = OTHER; note = cytidine-3'-phosphate
  modified_base 11: mod_base = OTHER; note = uridine-3'-phosphate
  modified_base 12: mod_base = OTHER; note = 2'-O-methylcytidine-3'-phosphate
  modified_base 13: mod_base = OTHER; note = adenosine-3'-phosphate
  modified_base 14: mod_base = OTHER; note = guanosine-3'-phosphate
  modified_base 15: mod_base = OTHER; note = guanosine-3'-phosphate
  modified_base 16: mod_base = OTHER; note = 2'-O-methylcytidine-3'-phosphate
  modified_base 17: mod_base = OTHER; note = adenosine-3'-phosphate
  modified_base 18: mod_base = OTHER; note = uridine-3'-phosphate
  modified_base 19: mod_base = OTHER; note = uridine-3'-phosphate
  modified_base 20: mod_base = OTHER; note = 2'-deoxythymidine-3'-phosphorothioate
  misc_feature 1..19: note = RNA
  misc_feature 20..21: note = DNA
gatgagcccctcaggcatttt

SEQ ID NO: 811 - DNA, 21 bp, synthetic construct
  source 1..21: mol_type = other DNA
  modified_base 1: mod_base = OTHER; note = 2'-O-methyluridine-3'-phosphate
  modified_base 2: mod_base = OTHER; note = guanosine-3'-phosphate
  modified_base 3: mod_base = OTHER; note = 2'-O-methylcytidine-3'-phosphate
  modified_base 4: mod_base = OTHER; note = 2'-O-methylcytidine-3'-phosphate
  modified_base 5: mod_base = OTHER; note = 2'-O-methyluridine-3'-phosphate
  modified_base 6: mod_base = OTHER; note = guanosine-3'-phosphate
  modified_base 7: mod_base = OTHER; note = adenosine-3'-phosphate
  modified_base 8: mod_base = OTHER; note = guanosine-3'-phosphate
  modified_base 9: mod_base = OTHER; note = guanosine-3'-phosphate
  modified_base 10: mod_base = OTHER; note = guanosine-3'-phosphate
  modified_base 11: mod_base = OTHER; note = guanosine-3'-phosphate
  modified_base 12: mod_base = OTHER; note = 2'-O-methylcytidine-3'-phosphate
  modified_base 13: mod_base = OTHER; note = 2'-O-methyluridine-3'-phosphate
  modified_base 14: mod_base = OTHER; note = 2'-O-methylcytidine-3'-phosphate
  modified_base 15: mod_base = OTHER; note = adenosine-3'-phosphate
  modified_base 16: mod_base = OTHER; note = 2'-O-methyluridine-3'-phosphate
  modified_base 17: mod_base = OTHER; note = 2'-O-methylcytidine-3'-phosphate
  modified_base 18: mod_base = OTHER; note = guanosine-3'-phosphate
  modified_base 19: mod_base = OTHER; note = adenosine-3'-phosphate
  modified_base 20: mod_base = OTHER; note = 2'-deoxythymidine-3'-phosphorothioate
  misc_feature 1..19: note = RNA
  misc_feature 20..21: note = DNA
tgcctgaggggctcatcgatt

SEQ ID NO: 812 - DNA, 21 bp, synthetic construct
  source 1..21: mol_type = other DNA
  modified_base 1: mod_base = OTHER; note = uridine-3'-phosphate
  modified_base 2: mod_base = OTHER; note = cytidine-3'-phosphate
  modified_base 3: mod_base = OTHER; note = guanosine-3'-phosphate
  modified_base 4: mod_base = OTHER; note = adenosine-3'-phosphate
  modified_base 5: mod_base = OTHER; note = uridine-3'-phosphate
  modified_base 6: mod_base = OTHER; note = guanosine-3'-phosphate
  modified_base 7: mod_base = OTHER; note = adenosine-3'-phosphate
  modified_base 8: mod_base = OTHER; note = guanosine-3'-phosphate
  modified_base 9: mod_base = OTHER; note = cytidine-3'-phosphate
  modified_base 10: mod_base = OTHER; note = cytidine-3'-phosphate
  modified_base 11: mod_base = OTHER; note = cytidine-3'-phosphate
  modified_base 12: mod_base = OTHER; note = cytidine-3'-phosphate
  modified_base 13: mod_base = OTHER; note = uridine-3'-phosphate
  modified_base 14: mod_base = OTHER; note = 2'-O-methylcytidine-3'-phosphate
  modified_base 15: mod_base = OTHER; note = adenosine-3'-phosphate
  modified_base 16: mod_base = OTHER; note = guanosine-3'-phosphate
  modified_base 17: mod_base = OTHER; note = guanosine-3'-phosphate
  modified_base 18: mod_base = OTHER; note = 2'-O-methylcytidine-3'-phosphate
  modified_base 19: mod_base = OTHER; note = adenosine-3'-phosphate
  modified_base 20: mod_base = OTHER; note = 2'-deoxythymidine-3'-phosphorothioate
  misc_feature 1..19: note = RNA
  misc_feature 20..21: note = DNA
tcgatgagcccctcaggcatt

SEQ ID NO: 813 - DNA, 21 bp, synthetic construct
  source 1..21: mol_type = other DNA
  modified_base 1: mod_base = OTHER; note = guanosine-3'-phosphate
  modified_base 2: mod_base = OTHER; note = guanosine-3'-phosphate
  modified_base 3: mod_base = OTHER; note = guanosine-3'-phosphate
  modified_base 4: mod_base = OTHER; note = 2'-O-methylcytidine-3'-phosphate
  modified_base 5: mod_base = OTHER; note = 2'-O-methyluridine-3'-phosphate
  modified_base 6: mod_base = OTHER; note = 2'-O-methylcytidine-3'-phosphate
  modified_base 7: mod_base = OTHER; note = adenosine-3'-phosphate
  modified_base 8: mod_base = OTHER; note = 2'-O-methyluridine-3'-phosphate
  modified_base 9: mod_base = OTHER; note = 2'-O-methylcytidine-3'-phosphate
  modified_base 10: mod_base = OTHER; note = guanosine-3'-phosphate
  modified_base 11: mod_base = OTHER; note = adenosine-3'-phosphate
  modified_base 12: mod_base = OTHER; note = 2'-O-methylcytidine-3'-phosphate
  modified_base 13: mod_base = OTHER; note = guanosine-3'-phosphate
  modified_base 14: mod_base = OTHER; note = 2'-O-methylcytidine-3'-phosphate
  modified_base 15: mod_base = OTHER; note = 2'-O-methylcytidine-3'-phosphate
  modified_base 16: mod_base = OTHER; note = 2'-O-methyluridine-3'-phosphate
  modified_base 17: mod_base = OTHER; note = guanosine-3'-phosphate
  modified_base 18: mod_base = OTHER; note = 2'-O-methyluridine-3'-phosphate
  modified_base 19: mod_base = OTHER; note = guanosine-3'-phosphate
  modified_base 20: mod_base = OTHER; note = 2'-deoxythymidine-3'-phosphorothioate
  misc_feature 1..19: note = RNA
  misc_feature 20..21: note = DNA
gggctcatcgacgcctgtgtt

SEQ ID NO: 814 - DNA, 21 bp, synthetic construct
  source 1..21: mol_type = other DNA
  modified_base 1: mod_base = OTHER; note = 2'-O-methylcytidine-3'-phosphate
  modified_base 2: mod_base = OTHER; note = adenosine-3'-phosphate
  modified_base 3: mod_base = OTHER; note = 2'-O-methylcytidine-3'-phosphate
  modified_base 4: mod_base = OTHER; note = adenosine-3'-phosphate
  modified_base 5: mod_base = OTHER; note = guanosine-3'-phosphate
  modified_base 6: mod_base = OTHER; note = guanosine-3'-phosphate
  modified_base 7: mod_base = OTHER; note = cytidine-3'-phosphate
  modified_base 8: mod_base = OTHER; note = guanosine-3'-phosphate
  modified_base 9: mod_base = OTHER; note = uridine-3'-phosphate
  modified_base 10: mod_base = OTHER; note = cytidine-3'-phosphate
  modified_base 11: mod_base = OTHER; note = guanosine-3'-phosphate
  modified_base 12: mod_base = OTHER; note = adenosine-3'-phosphate
  modified_base 13: mod_base = OTHER; note = uridine-3'-phosphate
  modified_base 14: mod_base = OTHER; note = guanosine-3'-phosphate
  modified_base 15: mod_base = OTHER; note = adenosine-3'-phosphate
  modified_base 16: mod_base = OTHER; note = guanosine-3'-phosphate
  modified_base 17: mod_base = OTHER; note = cytidine-3'-phosphate
  modified_base 18: mod_base = OTHER; note = cytidine-3'-phosphate
  modified_base 19: mod_base = OTHER; note = cytidine-3'-phosphate
  modified_base 20: mod_base = OTHER; note = 2'-deoxythymidine-3'-phosphorothioate
  misc_feature 1..19: note = RNA
  misc_feature 20..21: note = DNA
cacaggcgtcgatgagccctt

SEQ ID NO: 815 - DNA, 21 bp, synthetic construct
  source 1..21: mol_type = other DNA
  modified_base 1: mod_base = OTHER; note = guanosine-3'-phosphate
  modified_base 2: mod_base = OTHER; note = guanosine-3'-phosphate
  modified_base 3: mod_base = OTHER; note = 2'-O-methylcytidine-3'-phosphate
  modified_base 4: mod_base = OTHER; note = 2'-O-methyluridine-3'-phosphate
  modified_base 5: mod_base = OTHER; note = 2'-O-methylcytidine-3'-phosphate
  modified_base 6: mod_base = OTHER; note = adenosine-3'-phosphate
  modified_base 7: mod_base = OTHER; note = 2'-O-methyluridine-3'-phosphate
  modified_base 8: mod_base = OTHER; note = 2'-O-methylcytidine-3'-phosphate
  modified_base 9: mod_base = OTHER; note = guanosine-3'-phosphate
  modified_base 10: mod_base = OTHER; note = adenosine-3'-phosphate
  modified_base 11: mod_base = OTHER; note = 2'-O-methylcytidine-3'-phosphate
  modified_base 12: mod_base = OTHER; note = guanosine-3'-phosphate
  modified_base 13: mod_base = OTHER; note = 2'-O-methylcytidine-3'-phosphate
  modified_base 14: mod_base = OTHER; note = 2'-O-methylcytidine-3'-phosphate
  modified_base 15: mod_base = OTHER; note = 2'-O-methyluridine-3'-phosphate
  modified_base 16: mod_base = OTHER; note = guanosine-3'-phosphate
  modified_base 17: mod_base = OTHER; note = 2'-O-methyluridine-3'-phosphate
  modified_base 18: mod_base = OTHER; note = guanosine-3'-phosphate
  modified_base 19: mod_base = OTHER; note = adenosine-3'-phosphate
  modified_base 20: mod_base = OTHER; note = 2'-deoxythymidine-3'-phosphorothioate
  misc_feature 1..19: note = RNA
  misc_feature 20..21: note = DNA
ggctcatcgacgcctgtgatt

SEQ ID NO: 816 - DNA, 21 bp, synthetic construct
  source 1..21: mol_type = other DNA
  modified_base 1: mod_base = OTHER; note = uridine-3'-phosphate
  modified_base 2: mod_base = OTHER; note = 2'-O-methylcytidine-3'-phosphate
  modified_base 3: mod_base = OTHER; note = adenosine-3'-phosphate
  modified_base 4: mod_base = OTHER; note = 2'-O-methylcytidine-3'-phosphate
  modified_base 5: mod_base = OTHER; note = adenosine-3'-phosphate
  modified_base 6: mod_base = OTHER; note = guanosine-3'-phosphate
  modified_base 7: mod_base = OTHER; note = guanosine-3'-phosphate
  modified_base 8: mod_base = OTHER; note = cytidine-3'-phosphate
  modified_base 9: mod_base = OTHER; note = guanosine-3'-phosphate
  modified_base 10: mod_base = OTHER; note = uridine-3'-phosphate
  modified_base 11: mod_base = OTHER; note = cytidine-3'-phosphate
  modified_base 12: mod_base = OTHER; note = guanosine-3'-phosphate
  modified_base 13: mod_base = OTHER; note = adenosine-3'-phosphate
  modified_base 14: mod_base = OTHER; note = uridine-3'-phosphate
  modified_base 15: mod_base = OTHER; note = guanosine-3'-phosphate
  modified_base 16: mod_base = OTHER; note = adenosine-3'-phosphate
  modified_base 17: mod_base = OTHER; note = guanosine-3'-phosphate
  modified_base 18: mod_base = OTHER; note = cytidine-3'-phosphate
  modified_base 19: mod_base = OTHER; note = cytidine-3'-phosphate
  modified_base 20: mod_base = OTHER; note = 2'-deoxythymidine-3'-phosphorothioate
  misc_feature 1..19: note = RNA
  misc_feature 20..21: note = DNA
tcacaggcgtcgatgagcctt

SEQ ID NO: 817 - DNA, 21 bp, synthetic construct
  source 1..21: mol_type = other DNA
  modified_base 1: mod_base = OTHER; note = adenosine-3'-phosphate
  modified_base 2: mod_base = OTHER; note = 2'-O-methyluridine-3'-phosphate
  modified_base 3: mod_base = OTHER; note = 2'-O-methylcytidine-3'-phosphate
  modified_base 4: mod_base = OTHER; note = guanosine-3'-phosphate
  modified_base 5: mod_base = OTHER; note = adenosine-3'-phosphate
  modified_base 6: mod_base = OTHER; note = 2'-O-methylcytidine-3'-phosphate
  modified_base 7: mod_base = OTHER; note = guanosine-3'-phosphate
  modified_base 8: mod_base = OTHER; note = 2'-O-methylcytidine-3'-phosphate
  modified_base 9: mod_base = OTHER; note = 2'-O-methylcytidine-3'-phosphate
  modified_base 10: mod_base = OTHER; note = 2'-O-methyluridine-3'-phosphate
  modified_base 11: mod_base = OTHER; note = guanosine-3'-phosphate
  modified_base 12: mod_base = OTHER; note = 2'-O-methyluridine-3'-phosphate
  modified_base 13: mod_base = OTHER; note = guanosine-3'-phosphate
  modified_base 14: mod_base = OTHER; note = adenosine-3'-phosphate
  modified_base 15: mod_base = OTHER; note = 2'-O-methylcytidine-3'-phosphate
  modified_base 16: mod_base = OTHER; note = adenosine-3'-phosphate
  modified_base 17: mod_base = OTHER; note = guanosine-3'-phosphate
  modified_base 18: mod_base = OTHER; note = guanosine-3'-phosphate
  modified_base 19: mod_base = OTHER; note = guanosine-3'-phosphate
  modified_base 20: mod_base = OTHER; note = 2'-deoxythymidine-3'-phosphorothioate
  misc_feature 1..19: note = RNA
  misc_feature 20..21: note = DNA
atcgacgcctgtgacagggtt

SEQ ID NO: 818 - DNA, 21 bp, synthetic construct
  source 1..21: mol_type = other DNA
  modified_base 1: mod_base = OTHER; note = cytidine-3'-phosphate
  modified_base 2: mod_base = OTHER; note = cytidine-3'-phosphate
  modified_base 3: mod_base = OTHER; note = cytidine-3'-phosphate
  modified_base 4: mod_base = OTHER; note = uridine-3'-phosphate
  modified_base 5: mod_base = OTHER; note = guanosine-3'-phosphate
  modified_base 6: mod_base = OTHER; note = uridine-3'-phosphate
  modified_base 7: mod_base = OTHER; note = 2'-O-methylcytidine-3'-phosphate
  modified_base 8: mod_base = OTHER; note = adenosine-3'-phosphate
  modified_base 9: mod_base = OTHER; note = 2'-O-methylcytidine-3'-phosphate
  modified_base 10: mod_base = OTHER; note = adenosine-3'-phosphate
  modified_base 11: mod_base = OTHER; note = guanosine-3'-phosphate
  modified_base 12: mod_base = OTHER; note = guanosine-3'-phosphate
  modified_base 13: mod_base = OTHER; note = cytidine-3'-phosphate
  modified_base 14: mod_base = OTHER; note = guanosine-3'-phosphate
  modified_base 15: mod_base = OTHER; note = uridine-3'-phosphate
  modified_base 16: mod_base = OTHER; note = cytidine-3'-phosphate
  modified_base 17: mod_base = OTHER; note = guanosine-3'-phosphate
  modified_base 18: mod_base = OTHER; note = adenosine-3'-phosphate
  modified_base 19: mod_base = OTHER; note = uridine-3'-phosphate
  modified_base 20: mod_base = OTHER; note = 2'-deoxythymidine-3'-phosphorothioate
  misc_feature 1..19: note = RNA
  misc_feature 20..21: note = DNA
ccctgtcacaggcgtcgattt

SEQ ID NO: 819 - DNA, 21 bp, synthetic construct
  source 1..21: mol_type = other DNA
  modified_base 1: mod_base = OTHER; note = adenosine-3'-phosphate
  modified_base 2: mod_base = OTHER; note = guanosine-3'-phosphate
  modified_base 3: mod_base = OTHER; note = guanosine-3'-phosphate
  modified_base 4: mod_base = OTHER; note = adenosine-3'-phosphate
  modified_base 5: mod_base = OTHER; note = guanosine-3'-phosphate
  modified_base 6: mod_base = OTHER; note = 2'-O-methylcytidine-3'-phosphate
  modified_base 7: mod_base = OTHER; note = 2'-O-methylcytidine-3'-phosphate
  modified_base 8: mod_base = OTHER; note = 2'-O-methyluridine-3'-phosphate
  modified_base 9: mod_base = OTHER; note = 2'-O-methylcytidine-3'-phosphate
  modified_base 10: mod_base = OTHER; note = 2'-O-methylcytidine-3'-phosphate
  modified_base 11: mod_base = OTHER; note = adenosine-3'-phosphate
  modified_base 12: mod_base = OTHER; note = adenosine-3'-phosphate
  modified_base 13: mod_base = OTHER; note = guanosine-3'-phosphate
  modified_base 14: mod_base = OTHER; note = 2'-O-methylcytidine-3'-phosphate
  modified_base 15: mod_base = OTHER; note = adenosine-3'-phosphate
  modified_base 16: mod_base = OTHER; note = adenosine-3'-phosphate
  modified_base 17: mod_base = OTHER; note = adenosine-3'-phosphate
  modified_base 18: mod_base = OTHER; note = 2'-O-methyluridine-3'-phosphate
  modified_base 19: mod_base = OTHER; note = 2'-O-methylcytidine-3'-phosphate
  modified_base 20: mod_base = OTHER; note = 2'-deoxythymidine-3'-phosphorothioate
  misc_feature 1..19: note = RNA
  misc_feature 20..21: note = DNA
aggagcctccaagcaaatctt

SEQ ID NO: 820 - DNA, 21 bp, synthetic construct
  source 1..21: mol_type = other DNA
  modified_base 1: mod_base = OTHER; note = guanosine-3'-phosphate
  modified_base 2: mod_base = OTHER; note = adenosine-3'-phosphate
  modified_base 3: mod_base = OTHER; note = uridine-3'-phosphate
  modified_base 4: mod_base = OTHER; note = uridine-3'-phosphate
  modified_base 5: mod_base = OTHER; note = uridine-3'-phosphate
  modified_base 6: mod_base = OTHER; note = guanosine-3'-phosphate
  modified_base 7: mod_base = OTHER; note = cytidine-3'-phosphate
  modified_base 8: mod_base = OTHER; note = uridine-3'-phosphate
  modified_base 9: mod_base = OTHER; note = uridine-3'-phosphate
  modified_base 10: mod_base = OTHER; note = guanosine-3'-phosphate
  modified_base 11: mod_base = OTHER; note = guanosine-3'-phosphate
  modified_base 12: mod_base = OTHER; note = adenosine-3'-phosphate
  modified_base 13: mod_base = OTHER; note = guanosine-3'-phosphate
  modified_base 14: mod_base = OTHER; note = guanosine-3'-phosphate
  modified_base 15: mod_base = OTHER; note = cytidine-3'-phosphate
  modified_base 16: mod_base = OTHER; note = uridine-3'-phosphate
  modified_base 17: mod_base = OTHER; note = cytidine-3'-phosphate
  modified_base 18: mod_base = OTHER; note = cytidine-3'-phosphate
  modified_base 19: mod_base = OTHER; note = uridine-3'-phosphate
  modified_base 20: mod_base = OTHER; note = 2'-deoxythymidine-3'-phosphorothioate
  misc_feature 1..19: note = RNA
  misc_feature 20..21: note = DNA
gatttgcttggaggctccttt

SEQ ID NO: 821 - DNA, 21 bp, synthetic construct
  source 1..21: mol_type = other DNA
  modified_base 1: mod_base = OTHER; note = adenosine-3'-phosphate
  modified_base 2: mod_base = OTHER; note = 2'-O-methyluridine-3'-phosphate
  modified_base 3: mod_base = OTHER; note = 2'-O-methylcytidine-3'-phosphate
  modified_base 4: mod_base = OTHER; note = 2'-O-methylcytidine-3'-phosphate
  modified_base 5: mod_base = OTHER; note = adenosine-3'-phosphate
  modified_base 6: mod_base = OTHER; note = 2'-O-methyluridine-3'-phosphate
  modified_base 7: mod_base = OTHER; note = 2'-O-methyluridine-3'-phosphate
  modified_base 8: mod_base = OTHER; note = guanosine-3'-phosphate
  modified_base 9: mod_base = OTHER; note = 2'-O-methylcytidine-3'-phosphate
  modified_base 10: mod_base = OTHER; note = 2'-O-methyluridine-3'-phosphate
  modified_base 11: mod_base = OTHER; note = 2'-O-methylcytidine-3'-phosphate
  modified_base 12: mod_base = OTHER; note = adenosine-3'-phosphate
  modified_base 13: mod_base = OTHER; note = 2'-O-methyluridine-3'-phosphate
  modified_base 14: mod_base = OTHER; note = 2'-O-methylcytidine-3'-phosphate
  modified_base 15: mod_base = OTHER; note = 2'-O-methylcytidine-3'-phosphate
  modified_base 16: mod_base = OTHER; note = 2'-O-methyluridine-3'-phosphate
  modified_base 17: mod_base = OTHER; note = adenosine-3'-phosphate
  modified_base 18: mod_base = OTHER; note = guanosine-3'-phosphate
  modified_base 19: mod_base = OTHER; note = guanosine-3'-phosphate
  modified_base 20: mod_base = OTHER; note = 2'-deoxythymidine-3'-phosphorothioate
  misc_feature 1..19: note = RNA
  misc_feature 20..21: note = DNA
atccattgctcatcctaggtt

SEQ ID NO: 822 - DNA, 21 bp, synthetic construct
  source 1..21: mol_type = other DNA
  modified_base 1: mod_base = OTHER; note = cytidine-3'-phosphate
  modified_base 2: mod_base = OTHER; note = cytidine-3'-phosphate
  modified_base 3: mod_base = OTHER; note = 2'-O-methyluridine-3'-phosphate
  modified_base 4: mod_base = OTHER; note = adenosine-3'-phosphate
  modified_base 5: mod_base = OTHER; note = guanosine-3'-phosphate
  modified_base 6: mod_base = OTHER; note = guanosine-3'-phosphate
  modified_base 7: mod_base = OTHER; note = adenosine-3'-phosphate
  modified_base 8: mod_base = OTHER; note = uridine-3'-phosphate
  modified_base 9: mod_base = OTHER; note = guanosine-3'-phosphate
  modified_base 10: mod_base = OTHER; note = adenosine-3'-phosphate
  modified_base 11: mod_base = OTHER; note = guanosine-3'-phosphate
  modified_base 12: mod_base = OTHER; note = 2'-O-methylcytidine-3'-phosphate
  modified_base 13: mod_base = OTHER; note = adenosine-3'-phosphate
  modified_base 14: mod_base = OTHER; note = adenosine-3'-phosphate
  modified_base 15: mod_base = OTHER; note = uridine-3'-phosphate
  modified_base 16: mod_base = OTHER; note = guanosine-3'-phosphate
  modified_base 17: mod_base = OTHER; note = guanosine-3'-phosphate
  modified_base 18: mod_base = OTHER; note = adenosine-3'-phosphate
  modified_base 19: mod_base = OTHER; note = uridine-3'-phosphate
  modified_base 20: mod_base = OTHER; note = 2'-deoxythymidine-3'-phosphorothioate
  misc_feature 1..19: note = RNA
  misc_feature 20..21: note = DNA
cctaggatgagcaatggattt

SEQ ID NO: 823 - DNA, 21 bp, synthetic construct
  source 1..21: mol_type = other DNA
  modified_base 1: mod_base = OTHER; note = 2'-O-methyluridine-3'-phosphate
  modified_base 2: mod_base = OTHER; note = 2'-O-methylcytidine-3'-phosphate
  modified_base 3: mod_base = OTHER; note = adenosine-3'-phosphate
  modified_base 4: mod_base = OTHER; note = 2'-O-methyluridine-3'-phosphate
  modified_base 5: mod_base = OTHER; note = 2'-O-methylcytidine-3'-phosphate
  modified_base 6: mod_base = OTHER; note = 2'-O-methylcytidine-3'-phosphate
  modified_base 7: mod_base = OTHER; note = 2'-O-methyluridine-3'-phosphate
  modified_base 8: mod_base = OTHER; note = adenosine-3'-phosphate
  modified_base 9: mod_base = OTHER; note = guanosine-3'-phosphate
  modified_base 10: mod_base = OTHER; note = guanosine-3'-phosphate
  modified_base 11: mod_base = OTHER; note = adenosine-3'-phosphate
  modified_base 12: mod_base = OTHER; note = adenosine-3'-phosphate
  modified_base 13: mod_base = OTHER; note = guanosine-3'-phosphate
  modified_base 14: mod_base = OTHER; note = adenosine-3'-phosphate
  modified_base 15: mod_base = OTHER; note = 2'-O-methylcytidine-3'-phosphate
  modified_base 16: mod_base = OTHER; note = guanosine-3'-phosphate
  modified_base 17: mod_base = OTHER; note = guanosine-3'-phosphate
  modified_base 18: mod_base = OTHER; note = guanosine-3'-phosphate
  modified_base 19: mod_base = OTHER; note = 2'-O-methyluridine-3'-phosphate
  modified_base 20: mod_base = OTHER; note = 2'-deoxythymidine-3'-phosphorothioate
  misc_feature 1..19: note = RNA
  misc_feature 20..21: note = DNA
tcatcctaggaagacgggttt

SEQ ID NO: 824 - DNA, 21 bp, synthetic construct
  source 1..21: mol_type = other DNA
  modified_base 1: mod_base = OTHER; note = adenosine-3'-phosphate
  modified_base 2: mod_base = OTHER; note = cytidine-3'-phosphate
  modified_base 3: mod_base = OTHER; note = cytidine-3'-phosphate
  modified_base 4: mod_base = OTHER; note = cytidine-3'-phosphate
  modified_base 5: mod_base = OTHER; note = guanosine-3'-phosphate
  modified_base 6: mod_base = OTHER; note = uridine-3'-phosphate
  modified_base 7: mod_base = OTHER; note = cytidine-3'-phosphate
  modified_base 8: mod_base = OTHER; note = uridine-3'-phosphate
  modified_base 9: mod_base = OTHER; note = uridine-3'-phosphate
  modified_base 10: mod_base = OTHER; note = cytidine-3'-phosphate
  modified_base 11: mod_base = OTHER; note = cytidine-3'-phosphate
  modified_base 12: mod_base = OTHER; note = 2'-O-methyluridine-3'-phosphate
  modified_base 13: mod_base = OTHER; note = adenosine-3'-phosphate
  modified_base 14: mod_base = OTHER; note = guanosine-3'-phosphate
  modified_base 15: mod_base = OTHER; note = guanosine-3'-phosphate
  modified_base 16: mod_base = OTHER; note = adenosine-3'-phosphate
  modified_base 17: mod_base = OTHER; note = uridine-3'-phosphate
  modified_base 18: mod_base = OTHER; note = guanosine-3'-phosphate
  modified_base 19: mod_base = OTHER; note = adenosine-3'-phosphate
  modified_base 20: mod_base = OTHER; note = 2'-deoxythymidine-3'-phosphorothioate
  misc_feature 1..19: note = RNA
  misc_feature 20..21: note = DNA
acccgtcttcctaggatgatt

SEQ ID NO: 825 - DNA, 21 bp, synthetic construct
  source 1..21: mol_type = other DNA
  modified_base 1: mod_base = OTHER; note = 2'-O-methylcytidine-3'-phosphate
  modified_base 2: mod_base = OTHER; note = adenosine-3'-phosphate
  modified_base 3: mod_base = OTHER; note = 2'-O-methyluridine-3'-phosphate
  modified_base 4: mod_base = OTHER; note = 2'-O-methylcytidine-3'-phosphate
  modified_base 5: mod_base = OTHER; note = 2'-O-methylcytidine-3'-phosphate
  modified_base 6: mod_base = OTHER; note = 2'-O-methyluridine-3'-phosphate
  modified_base 7: mod_base = OTHER; note = adenosine-3'-phosphate
  modified_base 8: mod_base = OTHER; note = guanosine-3'-phosphate
  modified_base 9: mod_base = OTHER; note = guanosine-3'-phosphate
  modified_base 10: mod_base = OTHER; note = adenosine-3'-phosphate
  modified_base 11: mod_base = OTHER; note = adenosine-3'-phosphate
  modified_base 12: mod_base = OTHER; note = guanosine-3'-phosphate
  modified_base 13: mod_base = OTHER; note = adenosine-3'-phosphate
  modified_base 14: mod_base = OTHER; note = 2'-O-methylcytidine-3'-phosphate
  modified_base 15: mod_base = OTHER; note = guanosine-3'-phosphate
  modified_base 16: mod_base = OTHER; note = guanosine-3'-phosphate
  modified_base 17: mod_base = OTHER; note = guanosine-3'-phosphate
  modified_base 18: mod_base = OTHER; note = 2'-O-methyluridine-3'-phosphate
  modified_base 19: mod_base = OTHER; note = 2'-O-methyluridine-3'-phosphate
  modified_base 20: mod_base = OTHER; note = 2'-deoxythymidine-3'-phosphorothioate
  misc_feature 1..19: note = RNA
  misc_feature 20..21: note = DNA
catcctaggaagacgggtttt

SEQ ID NO: 826 - DNA, 21 bp, synthetic construct
  source 1..21: mol_type = other DNA
  modified_base 1: mod_base = OTHER; note = adenosine-3'-phosphate
  modified_base 2: mod_base = OTHER; note = adenosine-3'-phosphate
  modified_base 3: mod_base = OTHER; note = cytidine-3'-phosphate
  modified_base 4: mod_base = OTHER; note = cytidine-3'-phosphate
  modified_base 5: mod_base = OTHER; note = cytidine-3'-phosphate
  modified_base 6: mod_base = OTHER; note = guanosine-3'-phosphate
  modified_base 7: mod_base = OTHER; note = uridine-3'-phosphate
  modified_base 8: mod_base = OTHER; note = cytidine-3'-phosphate
  modified_base 9: mod_base = OTHER; note = uridine-3'-phosphate
  modified_base 10: mod_base = OTHER; note = uridine-3'-phosphate
  modified_base 11: mod_base = OTHER; note = cytidine-3'-phosphate
  modified_base 12: mod_base = OTHER; note = cytidine-3'-phosphate
  modified_base 13: mod_base = OTHER; note = 2'-O-methyluridine-3'-phosphate
  modified_base 14: mod_base = OTHER; note = adenosine-3'-phosphate
  modified_base 15: mod_base = OTHER; note = guanosine-3'-phosphate
  modified_base 16: mod_base = OTHER; note = guanosine-3'-phosphate
  modified_base 17: mod_base = OTHER; note = adenosine-3'-phosphate
  modified_base 18: mod_base = OTHER; note = uridine-3'-phosphate
  modified_base 19: mod_base = OTHER; note = guanosine-3'-phosphate
  modified_base 20: mod_base = OTHER; note = 2'-deoxythymidine-3'-phosphorothioate
  misc_feature 1..19: note = RNA
  misc_feature 20..21: note = DNA
aacccgtcttcctaggatgtt

SEQ ID NO: 827 - DNA, 21 bp, synthetic construct
  source 1..21: mol_type = other DNA
  modified_base 1: mod_base = OTHER; note = 2'-O-methylcytidine-3'-phosphate
  modified_base 2: mod_base = OTHER; note = 2'-O-methyluridine-3'-phosphate
  modified_base 3: mod_base = OTHER; note = adenosine-3'-phosphate
  modified_base 4: mod_base = OTHER; note = guanosine-3'-phosphate
  modified_base 5: mod_base = OTHER; note = guanosine-3'-phosphate
  modified_base 6: mod_base = OTHER; note = adenosine-3'-phosphate
  modified_base 7: mod_base = OTHER; note = adenosine-3'-phosphate
  modified_base 8: mod_base = OTHER; note = guanosine-3'-phosphate
  modified_base 9: mod_base = OTHER; note = adenosine-3'-phosphate
  modified_base 10: mod_base = OTHER; note = 2'-O-methylcytidine-3'-phosphate
  modified_base 11: mod_base = OTHER; note = guanosine-3'-phosphate
  modified_base 12: mod_base = OTHER; note = guanosine-3'-phosphate
  modified_base 13: mod_base = OTHER; note = guanosine-3'-phosphate
  modified_base 14: mod_base = OTHER; note = 2'-O-methyluridine-3'-phosphate
  modified_base 15: mod_base = OTHER; note = 2'-O-methyluridine-3'-phosphate
  modified_base 16: mod_base = OTHER; note = guanosine-3'-phosphate
  modified_base 17: mod_base = OTHER; note = adenosine-3'-phosphate
  modified_base 18: mod_base = OTHER; note = guanosine-3'-phosphate
  modified_base 19: mod_base = OTHER; note = adenosine-3'-phosphate
  modified_base 20: mod_base = OTHER; note = 2'-deoxythymidine-3'-phosphorothioate
  misc_feature 1..19: note = RNA
  misc_feature 20..21: note = DNA
ctaggaagacgggttgagatt

SEQ ID NO: 828 - DNA, 21 bp, synthetic construct
  source 1..21: mol_type = other DNA
  modified_base 1: mod_base = OTHER; note = uridine-3'-phosphate
  modified_base 2: mod_base = OTHER; note = cytidine-3'-phosphate
  modified_base 3: mod_base = OTHER; note = uridine-3'-phosphate
  modified_base 4: mod_base = OTHER; note = 2'-O-methylcytidine-3'-phosphate
  modified_base 5: mod_base = OTHER; note = adenosine-3'-phosphate
  modified_base 6: mod_base = OTHER; note = adenosine-3'-phosphate
  modified_base 7: mod_base = OTHER; note = cytidine-3'-phosphate
  modified_base 8: mod_base = OTHER; note = cytidine-3'-phosphate
  modified_base 9: mod_base = OTHER; note = cytidine-3'-phosphate
  modified_base 10: mod_base = OTHER; note = guanosine-3'-phosphate
  modified_base 11: mod_base = OTHER; note = uridine-3'-phosphate
  modified_base 12: mod_base = OTHER; note = cytidine-3'-phosphate
  modified_base 13: mod_base = OTHER; note = uridine-3'-phosphate
  modified_base 14: mod_base = OTHER; note = uridine-3'-phosphate
  modified_base 15: mod_base = OTHER; note = cytidine-3'-phosphate
  modified_base 16: mod_base = OTHER; note = cytidine-3'-phosphate
  modified_base 17: mod_base = OTHER; note = 2'-O-methyluridine-3'-phosphate
  modified_base 18: mod_base = OTHER; note = adenosine-3'-phosphate
  modified_base 19: mod_base = OTHER; note = guanosine-3'-phosphate
  modified_base 20: mod_base = OTHER; note = 2'-deoxythymidine-3'-phosphorothioate
  misc_feature 1..19: note = RNA
  misc_feature 20..21: note = DNA
tctcaacccgtcttcctagtt

SEQ ID NO: 829 - DNA, 21 bp, synthetic construct
  source 1..21: mol_type = other DNA
  modified_base 1: mod_base = OTHER; note = adenosine-3'-phosphate
  modified_base 2: mod_base = OTHER; note = 2'-O-methylcytidine-3'-phosphate
  modified_base 3: mod_base = OTHER; note = guanosine-3'-phosphate
  modified_base 4: mod_base = OTHER; note = guanosine-3'-phosphate
  modified_base 5: mod_base = OTHER; note = guanosine-3'-phosphate
  modified_base 6: mod_base = OTHER; note = 2'-O-methyluridine-3'-phosphate
  modified_base 7: mod_base = OTHER; note = 2'-O-methyluridine-3'-phosphate
  modified_base 8: mod_base = OTHER; note = guanosine-3'-phosphate
  modified_base 9: mod_base = OTHER; note = adenosine-3'-phosphate
  modified_base 10: mod_base = OTHER; note = guanosine-3'-phosphate
  modified_base 11: mod_base = OTHER; note = adenosine-3'-phosphate
  modified_base 12: mod_base = OTHER; note = adenosine-3'-phosphate
  modified_base 13: mod_base = OTHER; note = 2'-O-methyluridine-3'-phosphate
  modified_base 14: mod_base = OTHER; note = 2'-O-methylcytidine-3'-phosphate
  modified_base 15: mod_base = OTHER; note = 2'-O-methylcytidine-3'-phosphate
  modified_base 16: mod_base = OTHER; note = 2'-O-methylcytidine-3'-phosphate
  modified_base 17: mod_base = OTHER; note = 2'-O-methyluridine-3'-phosphate
  modified_base 18: mod_base = OTHER; note = adenosine-3'-phosphate
  modified_base 19: mod_base = OTHER; note = adenosine-3'-phosphate
  modified_base 20: mod_base = OTHER; note = 2'-deoxythymidine-3'-phosphorothioate
  misc_feature 1..19: note = RNA
  misc_feature 20..21: note = DNA
acgggttgagaatccctaatt

SEQ ID NO: 830 - DNA, 21 bp, synthetic construct
  source 1..21: mol_type = other DNA
  modified_base 1: mod_base = OTHER; note = uridine-3'-phosphate
  modified_base 2: mod_base = OTHER; note = 2'-O-methyluridine-3'-phosphate
  modified_base 3: mod_base = OTHER; note = adenosine-3'-phosphate
  modified_base 4: mod_base = OTHER; note = guanosine-3'-phosphate
  modified_base 5: mod_base = OTHER; note = guanosine-3'-phosphate
  modified_base 6: mod_base = OTHER; note = guanosine-3'-phosphate
  modified_base 7: mod_base = OTHER; note = adenosine-3'-phosphate
  modified_base 8: mod_base = OTHER; note = uridine-3'-phosphate
  modified_base 9: mod_base = OTHER; note = uridine-3'-phosphate
  modified_base 10: mod_base = OTHER; note = cytidine-3'-phosphate
  modified_base 11: mod_base = OTHER; note = uridine-3'-phosphate
  modified_base 12: mod_base = OTHER; note = 2'-O-methylcytidine-3'-phosphate
  modified_base 13: mod_base = OTHER; note = adenosine-3'-phosphate
  modified_base 14: mod_base = OTHER; note = adenosine-3'-phosphate
  modified_base 15: mod_base = OTHER; note = cytidine-3'-phosphate
  modified_base 16: mod_base = OTHER; note = cytidine-3'-phosphate
  modified_base 17: mod_base = OTHER; note = cytidine-3'-phosphate
  modified_base 18: mod_base = OTHER; note = guanosine-3'-phosphate
  modified_base 19: mod_base = OTHER; note = uridine-3'-phosphate
  modified_base 20: mod_base = OTHER; note = 2'-deoxythymidine-3'-phosphorothioate
  misc_feature 1..19: note = RNA
  misc_feature 20..21: note = DNA
ttagggattctcaacccgttt

SEQ ID NO: 831 - DNA, 21 bp, synthetic construct
  source 1..21: mol_type = other DNA
  modified_base 1: mod_base = OTHER; note = adenosine-3'-phosphate
  modified_base 2: mod_base = OTHER; note = guanosine-3'-phosphate
  modified_base 3: mod_base = OTHER; note = adenosine-3'-phosphate
  modified_base 4: mod_base = OTHER; note = adenosine-3'-phosphate
  modified_base 5: mod_base = OTHER; note = 2'-O-methyluridine-3'-phosphate
  modified_base 6: mod_base = OTHER; note = 2'-O-methylcytidine-3'-phosphate
  modified_base 7: mod_base = OTHER; note = 2'-O-methylcytidine-3'-phosphate
  modified_base 8: mod_base = OTHER; note = 2'-O-methylcytidine-3'-phosphate
  modified_base 9: mod_base = OTHER; note = 2'-O-methyluridine-3'-phosphate
  modified_base 10: mod_base = OTHER; note = adenosine-3'-phosphate
  modified_base 11: mod_base = OTHER; note = adenosine-3'-phosphate
  modified_base 12: mod_base = OTHER; note = 2'-O-methyluridine-3'-phosphate
  modified_base 13: mod_base = OTHER; note = 2'-O-methyluridine-3'-phosphate
  modified_base 14: mod_base = OTHER; note = 2'-O-methyluridine-3'-phosphate
  modified_base 15: mod_base = OTHER; note = guanosine-3'-phosphate
  modified_base 16: mod_base = OTHER; note = adenosine-3'-phosphate
  modified_base 17: mod_base = OTHER; note = guanosine-3'-phosphate
  modified_base 18: mod_base = OTHER; note = guanosine-3'-phosphate
  modified_base 19: mod_base = OTHER; note = guanosine-3'-phosphate
  modified_base 20: mod_base = OTHER; note = 2'-deoxythymidine-3'-phosphorothioate
  misc_feature 1..19: note = RNA
  misc_feature 20..21: note = DNA
agaatccctaatttgagggtt

SEQ ID NO: 832 - DNA, 21 bp, synthetic construct
  source 1..21: mol_type = other DNA
  modified_base 1: mod_base = OTHER; note = cytidine-3'-phosphate
  modified_base 2: mod_base = OTHER; note = cytidine-3'-phosphate
  modified_base 3: mod_base = OTHER; note = cytidine-3'-phosphate
  modified_base 4: mod_base = OTHER; note = uridine-3'-phosphate
  modified_base 5: mod_base = OTHER; note = 2'-O-methylcytidine-3'-phosphate
  modified_base 6: mod_base = OTHER; note = adenosine-3'-phosphate
  modified_base 7: mod_base = OTHER; note = adenosine-3'-phosphate
  modified_base 8: mod_base = OTHER; note = adenosine-3'-phosphate
  modified_base 9: mod_base = OTHER; note = uridine-3'-phosphate
  modified_base 10: mod_base = OTHER; note = 2'-O-methyluridine-3'-phosphate
  modified_base 11: mod_base = OTHER; note = adenosine-3'-phosphate
  modified_base 12: mod_base = OTHER; note = guanosine-3'-phosphate
  modified_base 13: mod_base = OTHER; note = guanosine-3'-phosphate
  modified_base 14: mod_base = OTHER; note = guanosine-3'-phosphate
  modified_base 15: mod_base = OTHER; note = adenosine-3'-phosphate
  modified_base 16: mod_base = OTHER; note = uridine-3'-phosphate
  modified_base 17: mod_base = OTHER; note = uridine-3'-phosphate
  modified_base 18: mod_base = OTHER; note = cytidine-3'-phosphate
  modified_base 19: mod_base = OTHER; note = uridine-3'-phosphate
  modified_base 20: mod_base = OTHER; note = 2'-deoxythymidine-3'-phosphorothioate
  misc_feature 1..19: note = RNA
  misc_feature 20..21: note = DNA
ccctcaaattagggattcttt

SEQ ID NO: 833 - DNA, 21 bp, synthetic construct
  source 1..21: mol_type = other DNA
  modified_base 1: mod_base = OTHER; note = adenosine-3'-phosphate
  modified_base 2: mod_base = OTHER; note = adenosine-3'-phosphate
  modified_base 3: mod_base = OTHER; note = 2'-O-methyluridine-3'-phosphate
  modified_base 4: mod_base = OTHER; note = 2'-O-methylcytidine-3'-phosphate
  modified_base 5: mod_base = OTHER; note = 2'-O-methylcytidine-3'-phosphate
  modified_base 6: mod_base = OTHER; note = 2'-O-methylcytidine-3'-phosphate
  modified_base 7: mod_base = OTHER; note = 2'-O-methyluridine-3'-phosphate
  modified_base 8: mod_base = OTHER; note = adenosine-3'-phosphate
  modified_base 9: mod_base = OTHER; note = adenosine-3'-phosphate
  modified_base 10: mod_base = OTHER; note = 2'-O-methyluridine-3'-phosphate
  modified_base 11: mod_base = OTHER; note = 2'-O-methyluridine-3'-phosphate
  modified_base 12: mod_base = OTHER; note = 2'-O-methyluridine-3'-phosphate
  modified_base 13: mod_base = OTHER; note = guanosine-3'-phosphate
  modified_base 14: mod_base = OTHER; note = adenosine-3'-phosphate
  modified_base 15: mod_base = OTHER; note = guanosine-3'-phosphate
  modified_base 16: mod_base = OTHER; note = guanosine-3'-phosphate
  modified_base 17: mod_base = OTHER; note = guanosine-3'-phosphate
  modified_base 18: mod_base = OTHER; note = 2'-O-methyluridine-3'-phosphate
  modified_base 19: mod_base = OTHER; note = 2'-O-methylcytidine-3'-phosphate
  modified_base 20: mod_base = OTHER; note = 2'-deoxythymidine-3'-phosphorothioate
  misc_feature 1..19: note = RNA
  misc_feature 20..21: note = DNA
aatccctaatttgagggtctt

SEQ ID NO: 834 - DNA, 21 bp, synthetic construct
  source 1..21: mol_type = other DNA
  modified_base 1: mod_base = OTHER; note = guanosine-3'-phosphate
  modified_base 2: mod_base = OTHER; note = adenosine-3'-phosphate
  modified_base 3: mod_base = OTHER; note = cytidine-3'-phosphate
  modified_base 4: mod_base = OTHER; note = cytidine-3'-phosphate
  modified_base 5: mod_base = OTHER; note = cytidine-3'-phosphate
  modified_base 6: mod_base = OTHER; note = uridine-3'-phosphate
  modified_base 7: mod_base = OTHER; note = 2'-O-methylcytidine-3'-phosphate
  modified_base 8: mod_base = OTHER; note = adenosine-3'-phosphate
  modified_base 9: mod_base = OTHER; note = adenosine-3'-phosphate
  modified_base 10: mod_base = OTHER; note = adenosine-3'-phosphate
  modified_base 11: mod_base = OTHER; note = uridine-3'-phosphate
  modified_base 12: mod_base = OTHER; note = 2'-O-methyluridine-3'-phosphate
  modified_base 13: mod_base = OTHER; note = adenosine-3'-phosphate
  modified_base 14: mod_base = OTHER; note = guanosine-3'-phosphate
  modified_base 15: mod_base = OTHER; note = guanosine-3'-phosphate
  modified_base 16: mod_base = OTHER; note = guanosine-3'-phosphate
  modified_base 17: mod_base = OTHER; note = adenosine-3'-phosphate
  modified_base 18: mod_base = OTHER; note = uridine-3'-phosphate
  modified_base 19: mod_base = OTHER; note = uridine-3'-phosphate
  modified_base 20: mod_base = OTHER; note = 2'-deoxythymidine-3'-phosphorothioate
  misc_feature 1..19: note = RNA
  misc_feature 20..21: note = DNA
gaccctcaaattagggatttt

SEQ ID NO: 835 - DNA, 21 bp, synthetic construct
  source 1..21: mol_type = other DNA
  modified_base 1: mod_base = OTHER; note = 2'-O-methylcytidine-3'-phosphate
  modified_base 2: mod_base = OTHER; note = 2'-O-methylcytidine-3'-phosphate
  modified_base 3: mod_base = OTHER; note = 2'-O-methylcytidine-3'-phosphate
  modified_base 4: mod_base = OTHER; note = 2'-O-methyluridine-3'-phosphate
  modified_base 5: mod_base = OTHER; note = adenosine-3'-phosphate
  modified_base 6: mod_base = OTHER; note = adenosine-3'-phosphate
  modified_base 7: mod_base = OTHER; note = 2'-O-methyluridine-3'-phosphate
  modified_base 8: mod_base = OTHER; note = 2'-O-methyluridine-3'-phosphate
  modified_base 9: mod_base = OTHER; note = 2'-O-methyluridine-3'-phosphate
  modified_base 10: mod_base = OTHER; note = guanosine-3'-phosphate
  modified_base 11: mod_base = OTHER; note = adenosine-3'-phosphate
  modified_base 12: mod_base = OTHER; note = guanosine-3'-phosphate
  modified_base 13: mod_base = OTHER; note = guanosine-3'-phosphate
  modified_base 14: mod_base = OTHER; note = guanosine-3'-phosphate
  modified_base 15: mod_base = OTHER; note = 2'-O-methyluridine-3'-phosphate
  modified_base 16: mod_base = OTHER; note = 2'-O-methylcytidine-3'-phosphate
  modified_base 17: mod_base = OTHER; note = adenosine-3'-phosphate
  modified_base 18: mod_base = OTHER; note = guanosine-3'-phosphate
  modified_base 19: mod_base = OTHER; note = 2'-O-methyluridine-3'-phosphate
  modified_base 20: mod_base = OTHER; note = 2'-deoxythymidine-3'-phosphorothioate
  misc_feature 1..19: note = RNA
  misc_feature 20..21: note = DNA
ccctaatttgagggtcagttt

SEQ ID NO: 836 - DNA, 21 bp, synthetic construct
  source 1..21: mol_type = other DNA
  modified_base 1: mod_base = OTHER; note = adenosine-3'-phosphate
  modified_base 2: mod_base = OTHER; note = cytidine-3'-phosphate
  modified_base 3: mod_base = OTHER; note = uridine-3'-phosphate
  modified_base 4: mod_base = OTHER; note = guanosine-3'-phosphate
  modified_base 5: mod_base = OTHER; note = adenosine-3'-phosphate
  modified_base 6: mod_base = OTHER; note = cytidine-3'-phosphate
  modified_base 7: mod_base = OTHER; note = cytidine-3'-phosphate
  modified_base 8: mod_base = OTHER; note = cytidine-3'-phosphate
  modified_base 9: mod_base = OTHER; note = uridine-3'-phosphate
  modified_base 10: mod_base = OTHER; note = 2'-O-methylcytidine-3'-phosphate
  modified_base 11: mod_base = OTHER; note = adenosine-3'-phosphate
  modified_base 12: mod_base = OTHER; note = adenosine-3'-phosphate
  modified_base 13: mod_base = OTHER; note = adenosine-3'-phosphate
  modified_base 14: mod_base = OTHER; note = uridine-3'-phosphate
  modified_base 15: mod_base = OTHER; note = 2'-O-methyluridine-3'-phosphate
  modified_base 16: mod_base = OTHER; note = adenosine-3'-phosphate
  modified_base 17: mod_base = OTHER; note = guanosine-3'-phosphate
  modified_base 18: mod_base = OTHER; note = guanosine-3'-phosphate
  modified_base 19: mod_base = OTHER; note = guanosine-3'-phosphate
  modified_base 20: mod_base = OTHER; note = 2'-deoxythymidine-3'-phosphorothioate
  misc_feature 1..19: note = RNA
  misc_feature 20..21: note = DNA
actgaccctcaaattagggtt

SEQ ID NO: 837 - DNA, 21 bp, synthetic construct
  source 1..21: mol_type = other DNA
  modified_base 1: mod_base = OTHER; note = 2'-O-methylcytidine-3'-phosphate
  modified_base 2: mod_base = OTHER; note = adenosine-3'-phosphate
  modified_base 3: mod_base = OTHER; note = 2'-O-methylcytidine-3'-phosphate
  modified_base 4: mod_base = OTHER; note = 2'-O-methyluridine-3'-phosphate
  modified_base 5: mod_base = OTHER; note = 2'-O-methylcytidine-3'-phosphate
  modified_base 6: mod_base = OTHER; note = adenosine-3'-phosphate
  modified_base 7: mod_base = OTHER; note = adenosine-3'-phosphate
  modified_base 8: mod_base = OTHER; note = 2'-O-methyluridine-3'-phosphate
  modified_base 9: mod_base = OTHER; note = guanosine-3'-phosphate
  modified_base 10: mod_base = OTHER; note = 2'-O-methylcytidine-3'-phosphate
  modified_base 11: mod_base = OTHER; note = 2'-O-methylcytidine-3'-phosphate
  modified_base 12: mod_base = OTHER; note = 2'-O-methyluridine-3'-phosphate
  modified_base 13: mod_base = OTHER; note = 2'-O-methylcytidine-3'-phosphate
  modified_base 14: mod_base = OTHER; note = adenosine-3'-phosphate
  modified_base 15: mod_base = OTHER; note = adenosine-3'-phosphate
  modified_base 16: mod_base = OTHER; note = 2'-O-methyluridine-3'-phosphate
  modified_base 17: mod_base = OTHER; note = 2'-O-methyluridine-3'-phosphate
  modified_base 18: mod_base = OTHER; note = 2'-O-methyluridine-3'-phosphate
  modified_base 19: mod_base = OTHER; note = guanosine-3'-phosphate
  modified_base 20: mod_base = OTHER; note = 2'-deoxythymidine-3'-phosphorothioate
  misc_feature 1..19: note = RNA
  misc_feature 20..21: note = DNA
cactcaatgcctcaatttgtt

SEQ ID NO: 838 - DNA, 21 bp, synthetic construct
  source 1..21: mol_type = other DNA
  modified_base 1: mod_base = OTHER; note = 2'-O-methylcytidine-3'-phosphate
  modified_base 2: mod_base = OTHER; note = adenosine-3'-phosphate
  modified_base 3: mod_base = OTHER; note = adenosine-3'-phosphate
  modified_base 4: mod_base = OTHER; note = adenosine-3'-phosphate
  modified_base 5: mod_base = OTHER; note = uridine-3'-phosphate
  modified_base 6: mod_base = OTHER; note = uridine-3'-phosphate
  modified_base 7: mod_base = OTHER; note = guanosine-3'-phosphate
  modified_base 8: mod_base = OTHER; note = adenosine-3'-phosphate
  modified_base 9: mod_base = OTHER; note = guanosine-3'-phosphate
  modified_base 10: mod_base = OTHER; note = guanosine-3'-phosphate
  modified_base 11: mod_base = OTHER; note = 2'-O-methylcytidine-3'-phosphate
  modified_base 12: mod_base = OTHER; note = adenosine-3'-phosphate
  modified_base 13: mod_base = OTHER; note = uridine-3'-phosphate
  modified_base 14: mod_base = OTHER; note = uridine-3'-phosphate
  modified_base 15: mod_base = OTHER; note = guanosine-3'-phosphate
  modified_base 16: mod_base = OTHER; note = adenosine-3'-phosphate
  modified_base 17: mod_base = OTHER; note = guanosine-3'-phosphate
  modified_base 18: mod_base = OTHER; note = uridine-3'-phosphate
  modified_base 19: mod_base = OTHER; note = guanosine-3'-phosphate
  modified_base 20: mod_base = OTHER; note = 2'-deoxythymidine-3'-phosphorothioate
  misc_feature 1..19: note = RNA
  misc_feature 20..21: note = DNA
caaattgaggcattgagtgtt

SEQ ID NO: 839 - DNA, 21 bp, synthetic construct
  source 1..21: mol_type = other DNA
  modified_base 1: mod_base = OTHER; note = adenosine-3'-phosphate
  modified_base 2: mod_base = OTHER; note = 2'-O-methylcytidine-3'-phosphate
  modified_base 3: mod_base = OTHER; note = 2'-O-methyluridine-3'-phosphate
  modified_base 4: mod_base = OTHER; note = 2'-O-methylcytidine-3'-phosphate
  modified_base 5: mod_base = OTHER; note = adenosine-3'-phosphate
  modified_base 6: mod_base = OTHER; note = adenosine-3'-phosphate
  modified_base 7: mod_base = OTHER; note = 2'-O-methyluridine-3'-phosphate
  modified_base 8: mod_base = OTHER; note = guanosine-3'-phosphate
  modified_base 9: mod_base = OTHER; note = 2'-O-methylcytidine-3'-phosphate
  modified_base 10: mod_base = OTHER; note = 2'-O-methylcytidine-3'-phosphate
  modified_base 11: mod_base = OTHER; note = 2'-O-methyluridine-3'-phosphate
  modified_base 12: mod_base = OTHER; note = 2'-O-methylcytidine-3'-phosphate
  modified_base 13: mod_base = OTHER; note = adenosine-3'-phosphate
  modified_base 14: mod_base = OTHER; note = adenosine-3'-phosphate
  modified_base 15: mod_base = OTHER; note = 2'-O-methyluridine-3'-phosphate
  modified_base 16: mod_base = OTHER; note = 2'-O-methyluridine-3'-phosphate
  modified_base 17: mod_base = OTHER; note = 2'-O-methyluridine-3'-phosphate
  modified_base 18: mod_base = OTHER; note = guanosine-3'-phosphate
  modified_base 19: mod_base = OTHER; note = 2'-O-methyluridine-3'-phosphate
  modified_base 20: mod_base = OTHER; note = 2'-deoxythymidine-3'-phosphorothioate
  misc_feature 1..19: note = RNA
  misc_feature 20..21: note = DNA
actcaatgcctcaatttgttt

SEQ ID NO: 840 - DNA, 21 bp, synthetic construct
  source 1..21: mol_type = other DNA
  modified_base 1: mod_base = OTHER; note = adenosine-3'-phosphate
  modified_base 2: mod_base = OTHER; note = 2'-O-methylcytidine-3'-phosphate
  modified_base 3: mod_base = OTHER; note = adenosine-3'-phosphate
  modified_base 4: mod_base = OTHER; note = adenosine-3'-phosphate
  modified_base 5: mod_base = OTHER; note = adenosine-3'-phosphate
  modified_base 6: mod_base = OTHER; note = uridine-3'-phosphate
  modified_base 7: mod_base = OTHER; note = uridine-3'-phosphate
  modified_base 8: mod_base = OTHER; note = guanosine-3'-phosphate
  modified_base 9: mod_base = OTHER; note = adenosine-3'-phosphate
  modified_base 10: mod_base = OTHER; note = guanosine-3'-phosphate
  modified_base 11: mod_base = OTHER; note = guanosine-3'-phosphate
  modified_base 12: mod_base = OTHER; note = 2'-O-methylcytidine-3'-phosphate
  modified_base 13: mod_base = OTHER; note = adenosine-3'-phosphate
  modified_base 14: mod_base = OTHER; note = uridine-3'-phosphate
  modified_base 15: mod_base = OTHER; note = uridine-3'-phosphate
  modified_base 16: mod_base = OTHER; note = guanosine-3'-phosphate
  modified_base 17: mod_base = OTHER; note = adenosine-3'-phosphate
  modified_base 18: mod_base = OTHER; note = guanosine-3'-phosphate
  modified_base 19: mod_base = OTHER; note = uridine-3'-phosphate
  modified_base 20: mod_base = OTHER; note = 2'-deoxythymidine-3'-phosphorothioate
  misc_feature 1..19: note = RNA
  misc_feature 20..21: note = DNA
acaaattgaggcattgagttt

SEQ ID NO: 841 - DNA, 21 bp, synthetic construct
  source 1..21: mol_type = other DNA
  modified_base 1: mod_base = OTHER; note = 2'-O-methyluridine-3'-phosphate
  modified_base 2: mod_base = OTHER; note = 2'-O-methyluridine-3'-phosphate
  modified_base 3: mod_base = OTHER; note = 2'-O-methylcytidine-3'-phosphate
  modified_base 4: mod_base = OTHER; note = 2'-O-methyluridine-3'-phosphate
  modified_base 5: mod_base = OTHER; note = guanosine-3'-phosphate
  modified_base 6: mod_base = OTHER; note = 2'-O-methylcytidine-3'-phosphate
  modified_base 7: mod_base = OTHER; note = adenosine-3'-phosphate
  modified_base 8: mod_base = OTHER; note = 2'-O-methyluridine-3'-phosphate
  modified_base 9: mod_base = OTHER; note = guanosine-3'-phosphate
  modified_base 10: mod_base = OTHER; note = adenosine-3'-phosphate
  modified_base 11: mod_base = OTHER; note = 2'-O-methylcytidine-3'-phosphate
  modified_base 12: mod_base = OTHER; note = 2'-O-methyluridine-3'-phosphate
  modified_base 13: mod_base = OTHER; note = guanosine-3'-phosphate
  modified_base 14: mod_base = OTHER; note = adenosine-3'-phosphate
  modified_base 15: mod_base = OTHER; note = guanosine-3'-phosphate
  modified_base 16: mod_base = OTHER; note = adenosine-3'-phosphate
  modified_base 17: mod_base = OTHER; note = guanosine-3'-phosphate
  modified_base 18: mod_base = OTHER; note = 2'-O-methyluridine-3'-phosphate
  modified_base 19: mod_base = OTHER; note = 2'-O-methylcytidine-3'-phosphate
  modified_base 20: mod_base = OTHER; note = 2'-deoxythymidine-3'-phosphorothioate
  misc_feature 1..19: note = RNA
  misc_feature 20..21: note = DNA
ttctgcatgactgagagtctt

SEQ ID NO: 842 - DNA, 21 bp, synthetic construct
  source 1..21: mol_type = other DNA
  modified_base 1: mod_base = OTHER; note = guanosine-3'-phosphate
  modified_base 2: mod_base = OTHER; note = adenosine-3'-phosphate
  modified_base 3: mod_base = OTHER; note = cytidine-3'-phosphate
  modified_base 4: mod_base = OTHER; note = uridine-3'-phosphate
  modified_base 5: mod_base = OTHER; note = cytidine-3'-phosphate
  modified_base 6: mod_base = OTHER; note = uridine-3'-phosphate
  modified_base 7: mod_base = OTHER; note = 2'-O-methylcytidine-3'-phosphate
  modified_base 8: mod_base = OTHER; note = adenosine-3'-phosphate
  modified_base 9: mod_base = OTHER; note = guanosine-3'-phosphate
  modified_base 10: mod_base = OTHER; note = uridine-3'-phosphate
  modified_base 11: mod_base = OTHER; note = 2'-O-methylcytidine-3'-phosphate
  modified_base 12: mod_base = OTHER; note = adenosine-3'-phosphate
  modified_base 13: mod_base = OTHER; note = uridine-3'-phosphate
  modified_base 14: mod_base = OTHER; note = guanosine-3'-phosphate
  modified_base 15: mod_base = OTHER; note = 2'-O-methylcytidine-3'-phosphate
  modified_base 16: mod_base = OTHER; note = adenosine-3'-phosphate
  modified_base 17: mod_base = OTHER; note = guanosine-3'-phosphate
  modified_base 18: mod_base = OTHER; note = adenosine-3'-phosphate
  modified_base 19: mod_base = OTHER; note = adenosine-3'-phosphate
  modified_base 20: mod_base = OTHER; note = 2'-deoxythymidine-3'-phosphorothioate
  misc_feature 1..19: note = RNA
  misc_feature 20..21: note = DNA
gactctcagtcatgcagaatt

SEQ ID NO: 843 - DNA, 21 bp, synthetic construct
  source 1..21: mol_type = other DNA
  modified_base 1: mod_base = OTHER; note = 2'-O-methyluridine-3'-phosphate
  modified_base 2: mod_base = OTHER; note = 2'-O-methylcytidine-3'-phosphate
  modified_base 3: mod_base = OTHER; note = 2'-O-methyluridine-3'-phosphate
  modified_base 4: mod_base = OTHER; note = guanosine-3'-phosphate
  modified_base 5: mod_base = OTHER; note = 2'-O-methylcytidine-3'-phosphate
  modified_base 6: mod_base = OTHER; note = adenosine-3'-phosphate
  modified_base 7: mod_base = OTHER; note = 2'-O-methyluridine-3'-phosphate
  modified_base 8: mod_base = OTHER; note = guanosine-3'-phosphate
  modified_base 9: mod_base = OTHER; note = adenosine-3'-phosphate
  modified_base 10: mod_base = OTHER; note = 2'-O-methylcytidine-3'-phosphate
  modified_base 11: mod_base = OTHER; note = 2'-O-methyluridine-3'-phosphate
  modified_base 12: mod_base = OTHER; note = guanosine-3'-phosphate
  modified_base 13: mod_base = OTHER; note = adenosine-3'-phosphate
  modified_base 14: mod_base = OTHER; note = guanosine-3'-phosphate
  modified_base 15: mod_base = OTHER; note = adenosine-3'-phosphate
  modified_base 16: mod_base = OTHER; note = guanosine-3'-phosphate
  modified_base 17: mod_base = OTHER; note = 2'-O-methyluridine-3'-phosphate
  modified_base 18: mod_base = OTHER; note = 2'-O-methylcytidine-3'-phosphate
  modified_base 19: mod_base = OTHER; note = 2'-O-methyluridine-3'-phosphate
  modified_base 20: mod_base = OTHER; note = 2'-deoxythymidine-3'-phosphorothioate
  misc_feature 1..19: note = RNA
  misc_feature 20..21: note = DNA
tctgcatgactgagagtcttt

SEQ ID NO: 844 - DNA, 21 bp, synthetic construct
  source 1..21: mol_type = other DNA
  modified_base 1: mod_base = OTHER; note = adenosine-3'-phosphate
  modified_base 2: mod_base = OTHER; note = guanosine-3'-phosphate
  modified_base 3: mod_base = OTHER; note = adenosine-3'-phosphate
  modified_base 4: mod_base = OTHER; note = cytidine-3'-phosphate
  modified_base 5: mod_base = OTHER; note = uridine-3'-phosphate
  modified_base 6: mod_base = OTHER; note = cytidine-3'-phosphate
  modified_base 7: mod_base = OTHER; note = uridine-3'-phosphate
  modified_base 8: mod_base = OTHER; note = 2'-O-methylcytidine-3'-phosphate
  modified_base 9: mod_base = OTHER; note = adenosine-3'-phosphate
  modified_base 10: mod_base = OTHER; note = guanosine-3'-phosphate
  modified_base 11: mod_base = OTHER; note = uridine-3'-phosphate
  modified_base 12: mod_base = OTHER; note = 2'-O-methylcytidine-3'-phosphate
  modified_base 13: mod_base = OTHER; note = adenosine-3'-phosphate
  modified_base 14: mod_base = OTHER; note = uridine-3'-phosphate
  modified_base 15: mod_base = OTHER; note = guanosine-3'-phosphate
  modified_base 16: mod_base = OTHER; note = 2'-O-methylcytidine-3'-phosphate
  modified_base 17: mod_base = OTHER; note = adenosine-3'-phosphate
  modified_base 18: mod_base = OTHER; note = guanosine-3'-phosphate
  modified_base 19: mod_base = OTHER; note = adenosine-3'-phosphate
  modified_base 20: mod_base = OTHER; note = 2'-deoxythymidine-3'-phosphorothioate
  misc_feature 1..19: note = RNA
  misc_feature 20..21: note = DNA
agactctcagtcatgcagatt

SEQ ID NO: 845 - DNA, 21 bp, synthetic construct
  source 1..21: mol_type = other DNA
  modified_base 1: mod_base = OTHER; note = guanosine-3'-phosphate
  modified_base 2: mod_base = OTHER; note = 2'-O-methylcytidine-3'-phosphate
  modified_base 3: mod_base = OTHER; note = adenosine-3'-phosphate
  modified_base 4: mod_base = OTHER; note = 2'-O-methyluridine-3'-phosphate
  modified_base 5: mod_base = OTHER; note = guanosine-3'-phosphate
  modified_base 6: mod_base = OTHER; note = adenosine-3'-phosphate
  modified_base 7: mod_base = OTHER; note = 2'-O-methylcytidine-3'-phosphate
  modified_base 8: mod_base = OTHER; note = 2'-O-methyluridine-3'-phosphate
  modified_base 9: mod_base = OTHER; note = guanosine-3'-phosphate
  modified_base 10: mod_base = OTHER; note = adenosine-3'-phosphate
  modified_base 11: mod_base = OTHER; note = guanosine-3'-phosphate
  modified_base 12: mod_base = OTHER; note = adenosine-3'-phosphate
  modified_base 13: mod_base = OTHER; note = guanosine-3'-phosphate
  modified_base 14: mod_base = OTHER; note = 2'-O-methyluridine-3'-phosphate
  modified_base 15: mod_base = OTHER; note = 2'-O-methylcytidine-3'-phosphate
  modified_base 16: mod_base = OTHER; note = 2'-O-methyluridine-3'-phosphate
  modified_base 17: mod_base = OTHER; note = 2'-O-methylcytidine-3'-phosphate
  modified_base 18: mod_base = OTHER; note = adenosine-3'-phosphate
  modified_base 19: mod_base = OTHER; note = guanosine-3'-phosphate
  modified_base 20: mod_base = OTHER; note = 2'-deoxythymidine-3'-phosphorothioate
  misc_feature 1..19: note = RNA
  misc_feature 20..21: note = DNA
gcatgactgagagtctcagtt

SEQ ID NO: 846 - DNA, 21 bp, synthetic construct
  source 1..21: mol_type = other DNA
  modified_base 1: mod_base = OTHER; note = cytidine-3'-phosphate
  modified_base 2: mod_base = OTHER; note = uridine-3'-phosphate
  modified_base 3: mod_base = OTHER; note = guanosine-3'-phosphate
  modified_base 4: mod_base = OTHER; note = adenosine-3'-phosphate
  modified_base 5: mod_base = OTHER; note = guanosine-3'-phosphate
  modified_base 6: mod_base = OTHER; note = adenosine-3'-phosphate
  modified_base 7: mod_base = OTHER; note = cytidine-3'-phosphate
  modified_base 8: mod_base = OTHER; note = uridine-3'-phosphate
  modified_base 9: mod_base = OTHER; note = cytidine-3'-phosphate
  modified_base 10: mod_base = OTHER; note = uridine-3'-phosphate
  modified_base 11: mod_base = OTHER; note = 2'-O-methylcytidine-3'-phosphate
  modified_base 12: mod_base = OTHER; note = adenosine-3'-phosphate
  modified_base 13: mod_base = OTHER; note = guanosine-3'-phosphate
  modified_base 14: mod_base = OTHER; note = uridine-3'-phosphate
  modified_base 15: mod_base = OTHER; note = 2'-O-methylcytidine-3'-phosphate
  modified_base 16: mod_base = OTHER; note = adenosine-3'-phosphate
  modified_base 17: mod_base = OTHER; note = uridine-3'-phosphate
  modified_base 18: mod_base = OTHER; note = guanosine-3'-phosphate
  modified_base 19: mod_base = OTHER; note = cytidine-3'-phosphate
  modified_base 20: mod_base = OTHER; note = 2'-deoxythymidine-3'-phosphorothioate
  misc_feature 1..19: note = RNA
  misc_feature 20..21: note = DNA
ctgagactctcagtcatgctt

SEQ ID NO: 847 - DNA, 21 bp, synthetic construct
  source 1..21: mol_type = other DNA
  modified_base 1: mod_base = OTHER; note = guanosine-3'-phosphate
  modified_base 2: mod_base = OTHER; note = adenosine-3'-phosphate
  modified_base 3: mod_base = OTHER; note = 2'-O-methylcytidine-3'-phosphate
  modified_base 4: mod_base = OTHER; note = 2'-O-methyluridine-3'-phosphate
  modified_base 5: mod_base = OTHER; note = guanosine-3'-phosphate
  modified_base 6: mod_base = OTHER; note = adenosine-3'-phosphate
  modified_base 7: mod_base = OTHER; note = guanosine-3'-phosphate
  modified_base 8: mod_base = OTHER; note = adenosine-3'-phosphate
  modified_base 9: mod_base = OTHER; note = guanosine-3'-phosphate
  modified_base 10: mod_base = OTHER; note = 2'-O-methyluridine-3'-phosphate
  modified_base 11: mod_base = OTHER; note = 2'-O-methylcytidine-3'-phosphate
  modified_base 12: mod_base = OTHER; note = 2'-O-methyluridine-3'-phosphate
  modified_base 13: mod_base = OTHER; note = 2'-O-methylcytidine-3'-phosphate
  modified_base 14: mod_base = OTHER; note = adenosine-3'-phosphate
  modified_base 15: mod_base = OTHER; note = guanosine-3'-phosphate
  modified_base 16: mod_base = OTHER; note = 2'-O-methyluridine-3'-phosphate
  modified_base 17: mod_base = OTHER; note = guanosine-3'-phosphate
  modified_base 18: mod_base = OTHER; note = 2'-O-methyluridine-3'-phosphate
  modified_base 19: mod_base = OTHER; note = 2'-O-methyluridine-3'-phosphate
  modified_base 20: mod_base = OTHER; note = 2'-deoxythymidine-3'-phosphorothioate
  misc_feature 1..19: note = RNA
  misc_feature 20..21: note = DNA
gactgagagtctcagtgtttt

SEQ ID NO: 848 - DNA, 21 bp, synthetic construct
  source 1..21: mol_type = other DNA
  modified_base 1: mod_base = OTHER; note = adenosine-3'-phosphate
  modified_base 2: mod_base = OTHER; note = adenosine-3'-phosphate
  modified_base 3: mod_base = OTHER; note = 2'-O-methylcytidine-3'-phosphate
  modified_base 4: mod_base = OTHER; note = adenosine-3'-phosphate
  modified_base 5: mod_base = OTHER; note = cytidine-3'-phosphate
  modified_base 6: mod_base = OTHER; note = uridine-3'-phosphate
  modified_base 7: mod_base = OTHER; note = guanosine-3'-phosphate
  modified_base 8: mod_base = OTHER; note = adenosine-3'-phosphate
  modified_base 9: mod_base = OTHER; note = guanosine-3'-phosphate
  modified_base 10: mod_base = OTHER; note = adenosine-3'-phosphate
  modified_base 11: mod_base = OTHER; note = cytidine-3'-phosphate
  modified_base 12: mod_base = OTHER; note = uridine-3'-phosphate
  modified_base 13: mod_base = OTHER; note = cytidine-3'-phosphate
  modified_base 14: mod_base = OTHER; note = uridine-3'-phosphate
  modified_base 15: mod_base = OTHER; note = 2'-O-methylcytidine-3'-phosphate
  modified_base 16: mod_base = OTHER; note = adenosine-3'-phosphate
  modified_base 17: mod_base = OTHER; note = guanosine-3'-phosphate
  modified_base 18: mod_base = OTHER; note = uridine-3'-phosphate
  modified_base 19: mod_base = OTHER; note = cytidine-3'-phosphate
  modified_base 20: mod_base = OTHER; note = 2'-deoxythymidine-3'-phosphorothioate
  misc_feature 1..19: note = RNA
  misc_feature 20..21: note = DNA
aacactgagactctcagtctt

SEQ ID NO: 849 - DNA, 21 bp, synthetic construct
  source 1..21: mol_type = other DNA
  modified_base 1: mod_base = OTHER; note = guanosine-3'-phosphate
  modified_base 2: mod_base = OTHER; note = adenosine-3'-phosphate
  modified_base 3: mod_base = OTHER; note = guanosine-3'-phosphate
  modified_base 4: mod_base = OTHER; note = 2'-O-methyluridine-3'-phosphate
  modified_base 5: mod_base = OTHER; note = 2'-O-methylcytidine-3'-phosphate
  modified_base 6: mod_base = OTHER; note = 2'-O-methyluridine-3'-phosphate
  modified_base 7: mod_base = OTHER; note = 2'-O-methylcytidine-3'-phosphate
  modified_base 8: mod_base = OTHER; note = adenosine-3'-phosphate
  modified_base 9: mod_base = OTHER; note = guanosine-3'-phosphate
  modified_base 10: mod_base = OTHER; note = 2'-O-methyluridine-3'-phosphate
  modified_base 11: mod_base = OTHER; note = guanosine-3'-phosphate
  modified_base 12: mod_base = OTHER; note = 2'-O-methyluridine-3'-phosphate
  modified_base 13: mod_base = OTHER; note = 2'-O-methyluridine-3'-phosphate
  modified_base 14: mod_base = OTHER; note = guanosine-3'-phosphate
  modified_base 15: mod_base = OTHER; note = guanosine-3'-phosphate
  modified_base 16: mod_base = OTHER; note = adenosine-3'-phosphate
  modified_base 17: mod_base = OTHER; note = adenosine-3'-phosphate
  modified_base 18: mod_base = OTHER; note = 2'-O-methylcytidine-3'-phosphate
  modified_base 19: mod_base = OTHER; note = guanosine-3'-phosphate
  modified_base 20: mod_base = OTHER; note = 2'-deoxythymidine-3'-phosphorothioate
  misc_feature 1..19: note = RNA
  misc_feature 20..21: note = DNA
gagtctcagtgttggaacgtt

SEQ ID NO: 850 - DNA, 21 bp, synthetic construct
  source 1..21: mol_type = other DNA
  modified_base 1: mod_base = OTHER; note = cytidine-3'-phosphate
  modified_base 2: mod_base = OTHER; note = guanosine-3'-phosphate
  modified_base 3: mod_base = OTHER; note = uridine-3'-phosphate
  modified_base 4: mod_base = OTHER; note = uridine-3'-phosphate
  modified_base 5: mod_base = OTHER; note = cytidine-3'-phosphate
  modified_base 6: mod_base = OTHER; note = 2'-O-methylcytidine-3'-phosphate
  modified_base 7: mod_base = OTHER; note = adenosine-3'-phosphate
  modified_base 8: mod_base = OTHER; note = adenosine-3'-phosphate
  modified_base 9: mod_base = OTHER; note = 2'-O-methylcytidine-3'-phosphate
  modified_base 10: mod_base = OTHER; note = adenosine-3'-phosphate
  modified_base 11: mod_base = OTHER; note = cytidine-3'-phosphate
  modified_base 12: mod_base = OTHER; note = uridine-3'-phosphate
  modified_base 13: mod_base = OTHER; note = guanosine-3'-phosphate
  modified_base 14: mod_base = OTHER; note = adenosine-3'-phosphate
  modified_base 15: mod_base = OTHER; note = guanosine-3'-phosphate
  modified_base 16: mod_base = OTHER; note = adenosine-3'-phosphate
  modified_base 17: mod_base = OTHER; note = cytidine-3'-phosphate
  modified_base 18: mod_base = OTHER; note = uridine-3'-phosphate
  modified_base 19: mod_base = OTHER; note = cytidine-3'-phosphate
  modified_base 20: mod_base = OTHER; note = 2'-deoxythymidine-3'-phosphorothioate
  misc_feature 1..19: note = RNA
  misc_feature 20..21: note = DNA
cgttccaacactgagactctt

SEQ ID NO: 851 - DNA, 21 bp, synthetic construct
  source 1..21: mol_type = other DNA
  modified_base 1: mod_base = OTHER; note = 2'-O-methylcytidine-3'-phosphate
  modified_base 2: mod_base = OTHER; note = 2'-O-methyluridine-3'-phosphate
  modified_base 3: mod_base = OTHER; note = 2'-O-methylcytidine-3'-phosphate
  modified_base 4: mod_base = OTHER; note = adenosine-3'-phosphate
  modified_base 5: mod_base = OTHER; note = guanosine-3'-phosphate
  modified_base 6: mod_base = OTHER; note = 2'-O-methyluridine-3'-phosphate
  modified_base 7: mod_base = OTHER; note = guanosine-3'-phosphate
  modified_base 8: mod_base = OTHER; note = 2'-O-methyluridine-3'-phosphate
  modified_base 9: mod_base = OTHER; note = 2'-O-methyluridine-3'-phosphate
  modified_base 10: mod_base = OTHER; note = guanosine-3'-phosphate
  modified_base 11: mod_base = OTHER; note = guanosine-3'-phosphate
  modified_base 12: mod_base = OTHER; note = adenosine-3'-phosphate
  modified_base 13: mod_base = OTHER; note = adenosine-3'-phosphate
  modified_base 14: mod_base = OTHER; note = 2'-O-methylcytidine-3'-phosphate
  modified_base 15: mod_base = OTHER; note = guanosine-3'-phosphate
  modified_base 16: mod_base = OTHER; note = guanosine-3'-phosphate
  modified_base 17: mod_base = OTHER; note = guanosine-3'-phosphate
  modified_base 18: mod_base = OTHER; note = adenosine-3'-phosphate
  modified_base 19: mod_base = OTHER; note = 2'-O-methylcytidine-3'-phosphate
  modified_base 20: mod_base = OTHER; note = 2'-deoxythymidine-3'-phosphorothioate
  misc_feature 1..19: note = RNA
  misc_feature 20..21: note = DNA
ctcagtgttggaacgggactt

SEQ ID NO: 852 - DNA, 21 bp, synthetic construct
  source 1..21: mol_type = other DNA
  modified_base 1: mod_base = OTHER; note = guanosine-3'-phosphate
  modified_base 2: mod_base = OTHER; note = uridine-3'-phosphate
  modified_base 3: mod_base = OTHER; note = cytidine-3'-phosphate
  modified_base 4: mod_base = OTHER; note = cytidine-3'-phosphate
  modified_base 5: mod_base = OTHER; note = cytidine-3'-phosphate
  modified_base 6: mod_base = OTHER; note = guanosine-3'-phosphate
  modified_base 7: mod_base = OTHER; note = uridine-3'-phosphate
  modified_base 8: mod_base = OTHER; note = uridine-3'-phosphate
  modified_base 9: mod_base = OTHER; note = cytidine-3'-phosphate
  modified_base 10: mod_base = OTHER; note = 2'-O-methylcytidine-3'-phosphate
  modified_base 11: mod_base = OTHER; note = adenosine-3'-phosphate
  modified_base 12: mod_base = OTHER; note = adenosine-3'-phosphate
  modified_base 13: mod_base = OTHER; note = 2'-O-methylcytidine-3'-phosphate
  modified_base 14: mod_base = OTHER; note = adenosine-3'-phosphate
  modified_base 15: mod_base = OTHER; note = cytidine-3'-phosphate
  modified_base 16: mod_base = OTHER; note = uridine-3'-phosphate
  modified_base 17: mod_base = OTHER; note = guanosine-3'-phosphate
  modified_base 18: mod_base = OTHER; note = adenosine-3'-phosphate
  modified_base 19: mod_base = OTHER; note = guanosine-3'-phosphate
  modified_base 20: mod_base = OTHER; note = 2'-deoxythymidine-3'-phosphorothioate
  misc_feature 1..19: note = RNA
  misc_feature 20..21: note = DNA
gtcccgttccaacactgagtt

SEQ ID NO: 853 - DNA, 21 bp, synthetic construct
  source 1..21: mol_type = other DNA
  modified_base 1: mod_base = OTHER; note = 2'-O-methyluridine-3'-phosphate
  modified_base 2: mod_base = OTHER; note = 2'-O-methyluridine-3'-phosphate
  modified_base 3: mod_base = OTHER; note = adenosine-3'-phosphate
  modified_base 4: mod_base = OTHER; note = 2'-O-methyluridine-3'-phosphate
  modified_base 5: mod_base = OTHER; note = 2'-O-methyluridine-3'-phosphate
  modified_base 6: mod_base = OTHER; note = 2'-O-methyluridine-3'-phosphate
  modified_base 7: mod_base = OTHER; note = 2'-O-methyluridine-3'-phosphate
  modified_base 8: mod_base = OTHER; note = guanosine-3'-phosphate
  modified_base 9: mod_base = OTHER; note = adenosine-3'-phosphate
  modified_base 10: mod_base = OTHER; note = guanosine-3'-phosphate
  modified_base 11: mod_base = OTHER; note = 2'-O-methyluridine-3'-phosphate
  modified_base 12: mod_base = OTHER; note = 2'-O-methylcytidine-3'-phosphate
  modified_base 13: mod_base = OTHER; note = 2'-O-methyluridine-3'-phosphate
  modified_base 14: mod_base = OTHER; note = guanosine-3'-phosphate
  modified_base 15: mod_base = OTHER; note = 2'-O-methyluridine-3'-phosphate
  modified_base 16: mod_base = OTHER; note = guanosine-3'-phosphate
  modified_base 17: mod_base = OTHER; note = adenosine-3'-phosphate
  modified_base 18: mod_base = OTHER; note = guanosine-3'-phosphate
  modified_base 19: mod_base = OTHER; note = guanosine-3'-phosphate
  modified_base 20: mod_base = OTHER; note = 2'-deoxythymidine-3'-phosphorothioate
  misc_feature 1..19: note = RNA
  misc_feature 20..21: note = DNA
ttattttgagtctgtgaggtt

SEQ ID NO: 854 - DNA, 21 bp, synthetic construct
  source 1..21: mol_type = other DNA
  modified_base 1: mod_base = OTHER; note = cytidine-3'-phosphate
  modified_base 2: mod_base = OTHER; note = cytidine-3'-phosphate
  modified_base 3: mod_base = OTHER; note = uridine-3'-phosphate
  modified_base 4: mod_base = OTHER; note = 2'-O-methylcytidine-3'-phosphate
  modified_base 5: mod_base = OTHER; note = adenosine-3'-phosphate
  modified_base 6: mod_base = OTHER; note = 2'-O-methylcytidine-3'-phosphate
  modified_base 7: mod_base = OTHER; note = adenosine-3'-phosphate
  modified_base 8: mod_base = OTHER; note = guanosine-3'-phosphate
  modified_base 9: mod_base = OTHER; note = adenosine-3'-phosphate
  modified_base 10: mod_base = OTHER; note = cytidine-3'-phosphate
  modified_base 11: mod_base = OTHER; note = uridine-3'-phosphate
  modified_base 12: mod_base = OTHER; note = 2'-O-methylcytidine-3'-phosphate
  modified_base 13: mod_base = OTHER; note = adenosine-3'-phosphate
  modified_base 14: mod_base = OTHER; note = adenosine-3'-phosphate
  modified_base 15: mod_base = OTHER; note = adenosine-3'-phosphate
  modified_base 16: mod_base = OTHER; note = adenosine-3'-phosphate
  modified_base 17: mod_base = OTHER; note = 2'-O-methyluridine-3'-phosphate
  modified_base 18: mod_base = OTHER; note = adenosine-3'-phosphate
  modified_base 19: mod_base = OTHER; note = adenosine-3'-phosphate
  modified_base 20: mod_base = OTHER; note = 2'-deoxythymidine-3'-phosphorothioate
  misc_feature 1..19: note = RNA
  misc_feature 20..21: note = DNA
cctcacagactcaaaataatt

SEQ ID NO: 855 - DNA, 21 bp, synthetic construct
  source 1..21: mol_type = other DNA
  modified_base 1: mod_base = OTHER; note = adenosine-3'-phosphate
  modified_base 2: mod_base = OTHER; note = 2'-O-methyluridine-3'-phosphate
  modified_base 3: mod_base = OTHER; note = 2'-O-methyluridine-3'-phosphate
  modified_base 4: mod_base = OTHER; note = 2'-O-methyluridine-3'-phosphate
  modified_base 5: mod_base = OTHER; note = 2'-O-methyluridine-3'-phosphate
  modified_base 6: mod_base = OTHER; note = guanosine-3'-phosphate
  modified_base 7: mod_base = OTHER; note = adenosine-3'-phosphate
  modified_base 8: mod_base = OTHER; note = guanosine-3'-phosphate
  modified_base 9: mod_base = OTHER; note = 2'-O-methyluridine-3'-phosphate
  modified_base 10: mod_base = OTHER; note = 2'-O-methylcytidine-3'-phosphate
  modified_base 11: mod_base = OTHER; note = 2'-O-methyluridine-3'-phosphate
  modified_base 12: mod_base = OTHER; note = guanosine-3'-phosphate
  modified_base 13: mod_base = OTHER; note = 2'-O-methyluridine-3'-phosphate
  modified_base 14: mod_base = OTHER; note = guanosine-3'-phosphate
  modified_base 15: mod_base = OTHER; note = adenosine-3'-phosphate
  modified_base 16: mod_base = OTHER; note = guanosine-3'-phosphate
  modified_base 17: mod_base = OTHER; note = guanosine-3'-phosphate
  modified_base 18: mod_base = OTHER; note = 2'-O-methyluridine-3'-phosphate
  modified_base 19: mod_base = OTHER; note = 2'-O-methylcytidine-3'-phosphate
  modified_base 20: mod_base = OTHER; note = 2'-deoxythymidine-3'-phosphorothioate
  misc_feature 1..19: note = RNA
  misc_feature 20..21: note = DNA
attttgagtctgtgaggtctt

SEQ ID NO: 856 - DNA, 21 bp, synthetic construct
  source 1..21: mol_type = other DNA
  modified_base 1: mod_base = OTHER; note = guanosine-3'-phosphate
  modified_base 2: mod_base = OTHER; note = adenosine-3'-phosphate
  modified_base 3: mod_base = OTHER; note = cytidine-3'-phosphate
  modified_base 4: mod_base = OTHER; note = cytidine-3'-phosphate
  modified_base 5: mod_base = OTHER; note = uridine-3'-phosphate
  modified_base 6: mod_base = OTHER; note = 2'-O-methylcytidine-3'-phosphate
  modified_base 7: mod_base = OTHER; note = adenosine-3'-phosphate
  modified_base 8: mod_base = OTHER; note = 2'-O-methylcytidine-3'-phosphate
  modified_base 9: mod_base = OTHER; note = adenosine-3'-phosphate
  modified_base 10: mod_base = OTHER; note = guanosine-3'-phosphate
  modified_base 11: mod_base = OTHER; note = adenosine-3'-phosphate
  modified_base 12: mod_base = OTHER; note = cytidine-3'-phosphate
  modified_base 13: mod_base = OTHER; note = uridine-3'-phosphate
  modified_base 14: mod_base = OTHER; note = 2'-O-methylcytidine-3'-phosphate
  modified_base 15: mod_base = OTHER; note = adenosine-3'-phosphate
  modified_base 16: mod_base = OTHER; note = adenosine-3'-phosphate
  modified_base 17: mod_base = OTHER; note = adenosine-3'-phosphate
  modified_base 18: mod_base = OTHER; note = adenosine-3'-phosphate
  modified_base 19: mod_base = OTHER; note = uridine-3'-phosphate
  modified_base 20: mod_base = OTHER; note = 2'-deoxythymidine-3'-phosphorothioate
  misc_feature 1..19: note = RNA
  misc_feature 20..21: note = DNA
gacctcacagactcaaaattt

SEQ ID NO: 857 - DNA, 21 bp, synthetic construct
  source 1..21: mol_type = other DNA
  modified_base 1: mod_base = OTHER; note = adenosine-3'-phosphate
  modified_base 2: mod_base = OTHER; note = 2'-O-methyluridine-3'-phosphate
  modified_base 3: mod_base = OTHER; note = adenosine-3'-phosphate
  modified_base 4: mod_base = OTHER; note = 2'-O-methyluridine-3'-phosphate
  modified_base 5: mod_base = OTHER; note = adenosine-3'-phosphate
  modified_base 6: mod_base = OTHER; note = 2'-O-methyluridine-3'-phosphate
  modified_base 7: mod_base = OTHER; note = 2'-O-methyluridine-3'-phosphate
  modified_base 8: mod_base = OTHER; note = guanosine-3'-phosphate
  modified_base 9: mod_base = OTHER; note = 2'-O-methyluridine-3'-phosphate
  modified_base 10: mod_base = OTHER; note = adenosine-3'-phosphate
  modified_base 11: mod_base = OTHER; note = guanosine-3'-phosphate
  modified_base 12: mod_base = OTHER; note = 2'-O-methyluridine-3'-phosphate
  modified_base 13: mod_base = OTHER; note = adenosine-3'-phosphate
  modified_base 14: mod_base = OTHER; note = guanosine-3'-phosphate
  modified_base 15: mod_base = OTHER; note = adenosine-3'-phosphate
  modified_base 16: mod_base = OTHER; note = 2'-O-methyluridine-3'-phosphate
  modified_base 17: mod_base = OTHER; note = guanosine-3'-phosphate
  modified_base 18: mod_base = OTHER; note = 2'-O-methyluridine-3'-phosphate
  modified_base 19: mod_base = OTHER; note = 2'-O-methyluridine-3'-phosphate
  modified_base 20: mod_base = OTHER; note = 2'-deoxythymidine-3'-phosphorothioate
  misc_feature 1..19: note = RNA
  misc_feature 20..21: note = DNA
atatattgtagtagatgtttt

SEQ ID NO: 858 - DNA, 21 bp, synthetic construct
  source 1..21: mol_type = other DNA
  modified_base 1: mod_base = OTHER; note = adenosine-3'-phosphate
  modified_base 2: mod_base = OTHER; note = adenosine-3'-phosphate
  modified_base 3: mod_base = OTHER; note = 2'-O-methylcytidine-3'-phosphate
  modified_base 4: mod_base = OTHER; note = adenosine-3'-phosphate
  modified_base 5: mod_base = OTHER; note = uridine-3'-phosphate
  modified_base 6: mod_base = OTHER; note = cytidine-3'-phosphate
  modified_base 7: mod_base = OTHER; note = 2'-O-methyluridine-3'-phosphate
  modified_base 8: mod_base = OTHER; note = adenosine-3'-phosphate
  modified_base 9: mod_base = OTHER; note = cytidine-3'-phosphate
  modified_base 10: mod_base = OTHER; note = 2'-O-methyluridine-3'-phosphate
  modified_base 11: mod_base = OTHER; note = adenosine-3'-phosphate
  modified_base 12: mod_base = OTHER; note = 2'-O-methylcytidine-3'-phosphate
  modified_base 13: mod_base = OTHER; note = adenosine-3'-phosphate
  modified_base 14: mod_base = OTHER; note = adenosine-3'-phosphate
  modified_base 15: mod_base = OTHER; note = 2'-O-methyluridine-3'-phosphate
  modified_base 16: mod_base = OTHER; note = adenosine-3'-phosphate
  modified_base 17: mod_base = OTHER; note = 2'-O-methyluridine-3'-phosphate
  modified_base 18: mod_base = OTHER; note = adenosine-3'-phosphate
  modified_base 19: mod_base = OTHER; note = uridine-3'-phosphate
  modified_base 20: mod_base = OTHER; note = 2'-deoxythymidine-3'-phosphorothioate
  misc_feature 1..19: note = RNA
  misc_feature 20..21: note = DNA
aacatctactacaatatattt

SEQ ID NO: 859 - DNA, 21 bp, synthetic construct
  source 1..21: mol_type = other DNA
  modified_base 1: mod_base = OTHER; note = adenosine-3'-phosphate
  modified_base 2: mod_base = OTHER; note = 2'-O-methylcytidine-3'-phosphate
  modified_base 3: mod_base = OTHER; note = 2'-O-methyluridine-3'-phosphate
  modified_base 4: mod_base = OTHER; note = adenosine-3'-phosphate
  modified_base 5: mod_base = OTHER; note = adenosine-3'-phosphate
  modified_base 6: mod_base = OTHER; note = adenosine-3'-phosphate
  modified_base 7: mod_base = OTHER; note = 2'-O-methylcytidine-3'-phosphate
  modified_base 8: mod_base = OTHER; note = 2'-O-methyluridine-3'-phosphate
  modified_base 9: mod_base = OTHER; note = 2'-O-methyluridine-3'-phosphate
  modified_base 10: mod_base = OTHER; note = guanosine-3'-phosphate
  modified_base 11: mod_base = OTHER; note = 2'-O-methylcytidine-3'-phosphate
  modified_base 12: mod_base = OTHER; note = 2'-O-methyluridine-3'-phosphate
  modified_base 13: mod_base = OTHER; note = guanosine-3'-phosphate
  modified_base 14: mod_base = OTHER; note = 2'-O-methylcytidine-3'-phosphate
  modified_base 15: mod_base = OTHER; note = 2'-O-methyluridine-3'-phosphate
  modified_base 16: mod_base = OTHER; note = 2'-O-methyluridine-3'-phosphate
  modified_base 17: mod_base = OTHER; note = adenosine-3'-phosphate
  modified_base 18: mod_base = OTHER; note = adenosine-3'-phosphate
  modified_base 19: mod_base = OTHER; note = 2'-O-methyluridine-3'-phosphate
  modified_base 20: mod_base = OTHER; note = 2'-deoxythymidine-3'-phosphorothioate
  misc_feature 1..19: note = RNA
  misc_feature 20..21: note = DNA
actaaacttgctgcttaattt

SEQ ID NO: 860 - DNA, 21 bp, synthetic construct
  source 1..21: mol_type = other DNA
  modified_base 1: mod_base = OTHER; note = adenosine-3'-phosphate
  modified_base 2: mod_base = OTHER; note = uridine-3'-phosphate
  modified_base 3: mod_base = OTHER; note = 2'-O-methyluridine-3'-phosphate
  modified_base 4: mod_base = OTHER; note = adenosine-3'-phosphate
  modified_base 5: mod_base = OTHER; note = adenosine-3'-phosphate
  modified_base 6: mod_base = OTHER; note = guanosine-3'-phosphate
  modified_base 7: mod_base = OTHER; note = 2'-O-methylcytidine-3'-phosphate
  modified_base 8: mod_base = OTHER; note = adenosine-3'-phosphate
  modified_base 9: mod_base = OTHER; note = guanosine-3'-phosphate
  modified_base 10: mod_base = OTHER; note = 2'-O-methylcytidine-3'-phosphate
  modified_base 11: mod_base = OTHER; note = adenosine-3'-phosphate
  modified_base 12: mod_base = OTHER; note = adenosine-3'-phosphate
  modified_base 13: mod_base = OTHER; note = guanosine-3'-phosphate
  modified_base 14: mod_base = OTHER; note = uridine-3'-phosphate
  modified_base 15: mod_base = OTHER; note = uridine-3'-phosphate
  modified_base 16: mod_base = OTHER; note = 2'-O-methyluridine-3'-phosphate
  modified_base 17: mod_base = OTHER; note = adenosine-3'-phosphate
  modified_base 18: mod_base = OTHER; note = guanosine-3'-phosphate
  modified_base 19: mod_base = OTHER; note = uridine-3'-phosphate
  modified_base 20: mod_base = OTHER; note = 2'-deoxythymidine-3'-phosphorothioate
  misc_feature 1..19: note = RNA
  misc_feature 20..21: note = DNA
attaagcagcaagtttagttt

SEQ ID NO: 861 - DNA, 21 bp, synthetic construct
  source 1..21: mol_type = other DNA
  modified_base 1: mod_base = OTHER; note = guanosine-3'-phosphate
  modified_base 2: mod_base = OTHER; note = 2'-O-methylcytidine-3'-phosphate
  modified_base 3: mod_base = OTHER; note = 2'-O-methyluridine-3'-phosphate
  modified_base 4: mod_base = OTHER; note = guanosine-3'-phosphate
  modified_base 5: mod_base = OTHER; note = 2'-O-methylcytidine-3'-phosphate
  modified_base 6: mod_base = OTHER; note = 2'-O-methyluridine-3'-phosphate
  modified_base 7: mod_base = OTHER; note = 2'-O-methyluridine-3'-phosphate
  modified_base 8: mod_base = OTHER; note = adenosine-3'-phosphate
  modified_base 9: mod_base = OTHER; note = adenosine-3'-phosphate
  modified_base 10: mod_base = OTHER; note = 2'-O-methyluridine-3'-phosphate
  modified_base 11: mod_base = OTHER; note = guanosine-3'-phosphate
  modified_base 12: mod_base = OTHER; note = adenosine-3'-phosphate
  modified_base 13: mod_base = OTHER; note = 2'-O-methyluridine-3'-phosphate
  modified_base 14: mod_base = OTHER; note = 2'-O-methyluridine-3'-phosphate
  modified_base 15: mod_base = OTHER; note = 2'-O-methyluridine-3'-phosphate
  modified_base 16: mod_base = OTHER; note = guanosine-3'-phosphate
  modified_base 17: mod_base = OTHER; note = 2'-O-methylcytidine-3'-phosphate
  modified_base 18: mod_base = OTHER; note = 2'-O-methyluridine-3'-phosphate
  modified_base 19: mod_base = OTHER; note = 2'-O-methylcytidine-3'-phosphate
  modified_base 20: mod_base = OTHER; note = 2'-deoxythymidine-3'-phosphorothioate
  misc_feature 1..19: note = RNA
  misc_feature 20..21: note = DNA
gctgcttaatgatttgctctt

SEQ ID NO: 862 - DNA, 21 bp, synthetic construct
  source 1..21: mol_type = other DNA
  modified_base 1: mod_base = OTHER; note = guanosine-3'-phosphate
  modified_base 2: mod_base = OTHER; note = adenosine-3'-phosphate
  modified_base 3: mod_base = OTHER; note = guanosine-3'-phosphate
  modified_base 4: mod_base = OTHER; note = 2'-O-methylcytidine-3'-phosphate
  modified_base 5: mod_base = OTHER; note = adenosine-3'-phosphate
  modified_base 6: mod_base = OTHER; note = adenosine-3'-phosphate
  modified_base 7: mod_base = OTHER; note = adenosine-3'-phosphate
  modified_base 8: mod_base = OTHER; note = uridine-3'-phosphate
  modified_base 9: mod_base = OTHER; note = 2'-O-methylcytidine-3'-phosphate
  modified_base 10: mod_base = OTHER; note = adenosine-3'-phosphate
  modified_base 11: mod_base = OTHER; note = uridine-3'-phosphate
  modified_base 12: mod_base = OTHER; note = 2'-O-methyluridine-3'-phosphate
  modified_base 13: mod_base = OTHER; note = adenosine-3'-phosphate
  modified_base 14: mod_base = OTHER; note = adenosine-3'-phosphate
  modified_base 15: mod_base = OTHER; note = guanosine-3'-phosphate
  modified_base 16: mod_base = OTHER; note = 2'-O-methylcytidine-3'-phosphate
  modified_base 17: mod_base = OTHER; note = adenosine-3'-phosphate
  modified_base 18: mod_base = OTHER; note = guanosine-3'-phosphate
  modified_base 19: mod_base = OTHER; note = cytidine-3'-phosphate
  modified_base 20: mod_base = OTHER; note = 2'-deoxythymidine-3'-phosphorothioate
  misc_feature 1..19: note = RNA
  misc_feature 20..21: note = DNA
gagcaaatcattaagcagctt

SEQ ID NO: 863 - DNA, 21 bp, synthetic construct
  source 1..21: mol_type = other DNA
  modified_base 1: mod_base = OTHER; note = 2'-O-methyluridine-3'-phosphate
  modified_base 2: mod_base = OTHER; note = 2'-O-methyluridine-3'-phosphate
  modified_base 3: mod_base = OTHER; note = adenosine-3'-phosphate
  modified_base 4: mod_base = OTHER; note = adenosine-3'-phosphate
  modified_base 5: mod_base = OTHER; note = 2'-O-methyluridine-3'-phosphate
  modified_base 6: mod_base = OTHER; note = guanosine-3'-phosphate
  modified_base 7: mod_base = OTHER; note = adenosine-3'-phosphate
  modified_base 8: mod_base = OTHER; note = 2'-O-methyluridine-3'-phosphate
  modified_base 9: mod_base = OTHER; note = 2'-O-methyluridine-3'-phosphate
  modified_base 10: mod_base = OTHER; note = 2'-O-methyluridine-3'-phosphate
  modified_base 11: mod_base = OTHER; note = guanosine-3'-phosphate
  modified_base 12: mod_base = OTHER; note = 2'-O-methylcytidine-3'-phosphate
  modified_base 13: mod_base = OTHER; note = 2'-O-methyluridine-3'-phosphate
  modified_base 14: mod_base = OTHER; note = 2'-O-methylcytidine-3'-phosphate
  modified_base 15: mod_base = OTHER; note = adenosine-3'-phosphate
  modified_base 16: mod_base = OTHER; note = 2'-O-methylcytidine-3'-phosphate
  modified_base 17: mod_base = OTHER; note = adenosine-3'-phosphate
  modified_base 18: mod_base = OTHER; note = 2'-O-methyluridine-3'-phosphate
  modified_base 19: mod_base = OTHER; note = 2'-O-methylcytidine-3'-phosphate
  modified_base 20: mod_base = OTHER; note = 2'-deoxythymidine-3'-phosphorothioate
  misc_feature 1..19: note = RNA
  misc_feature 20..21: note = DNA
ttaatgatttgctcacatctt

SEQ ID NO: 864 - DNA, 21 bp, synthetic construct
  source 1..21: mol_type = other DNA
  modified_base 1: mod_base = OTHER; note = guanosine-3'-phosphate
  modified_base 2: mod_base = OTHER; note = adenosine-3'-phosphate
  modified_base 3: mod_base = OTHER; note = uridine-3'-phosphate
  modified_base 4: mod_base = OTHER; note = guanosine-3'-phosphate
  modified_base 5: mod_base = OTHER; note = uridine-3'-phosphate
  modified_base 6: mod_base = OTHER; note = guanosine-3'-phosphate
  modified_base 7: mod_base = OTHER; note = adenosine-3'-phosphate
  modified_base 8: mod_base = OTHER; note = guanosine-3'-phosphate
  modified_base 9: mod_base = OTHER; note = 2'-O-methylcytidine-3'-phosphate
  modified_base 10: mod_base = OTHER; note = adenosine-3'-phosphate
  modified_base 11: mod_base = OTHER; note = adenosine-3'-phosphate
  modified_base 12: mod_base = OTHER; note = adenosine-3'-phosphate
  modified_base 13: mod_base = OTHER; note = uridine-3'-phosphate
  modified_base 14: mod_base = OTHER; note = 2'-O-methylcytidine-3'-phosphate
  modified_base 15: mod_base = OTHER; note = adenosine-3'-phosphate
  modified_base 16: mod_base = OTHER; note = uridine-3'-phosphate
  modified_base 17: mod_base = OTHER; note = 2'-O-methyluridine-3'-phosphate
  modified_base 18: mod_base = OTHER; note = adenosine-3'-phosphate
  modified_base 19: mod_base = OTHER; note = adenosine-3'-phosphate
  modified_base 20: mod_base = OTHER; note = 2'-deoxythymidine-3'-phosphorothioate
  misc_feature 1..19: note = RNA
  misc_feature 20..21: note = DNA
gatgtgagcaaatcattaatt

SEQ ID NO: 865 - DNA, 21 bp, synthetic construct
  source 1..21: mol_type = other DNA
  modified_base 1: mod_base = OTHER; note = 2'-O-methylcytidine-3'-phosphate
  modified_base 2: mod_base = OTHER; note = adenosine-3'-phosphate
  modified_base 3: mod_base = OTHER; note = 2'-O-methylcytidine-3'-phosphate
  modified_base 4: mod_base = OTHER; note = adenosine-3'-phosphate
  modified_base 5: mod_base = OTHER; note = 2'-O-methyluridine-3'-phosphate
  modified_base 6: mod_base = OTHER; note = 2'-O-methylcytidine-3'-phosphate
  modified_base 7: mod_base = OTHER; note = 2'-O-methyluridine-3'-phosphate
  modified_base 8: mod_base = OTHER; note = adenosine-3'-phosphate
  modified_base 9: mod_base = OTHER; note = guanosine-3'-phosphate
  modified_base 10: mod_base = OTHER; note = 2'-O-methyluridine-3'-phosphate
  modified_base 11: mod_base = OTHER; note = adenosine-3'-phosphate
  modified_base 12: mod_base = OTHER; note = adenosine-3'-phosphate
  modified_base 13: mod_base = OTHER; note = adenosine-3'-phosphate
  modified_base 14: mod_base = OTHER; note = adenosine-3'-phosphate
  modified_base 15: mod_base = OTHER; note = 2'-O-methylcytidine-3'-phosphate
  modified_base 16: mod_base = OTHER; note = adenosine-3'-phosphate
  modified_base 17: mod_base = OTHER; note = 2'-O-methyluridine-3'-phosphate
  modified_base 18: mod_base = OTHER; note = guanosine-3'-phosphate
  modified_base 19: mod_base = OTHER; note = guanosine-3'-phosphate
  modified_base 20: mod_base = OTHER; note = 2'-deoxythymidine-3'-phosphorothioate
  misc_feature 1..19: note = RNA
  misc_feature 20..21: note = DNA
cacatctagtaaaacatggtt

SEQ ID NO: 866 - DNA, 21 bp, synthetic construct
  source 1..21: mol_type = other DNA
  modified_base 1: mod_base = OTHER; note = cytidine-3'-phosphate
  modified_base 2: mod_base = OTHER; note = 2'-O-methylcytidine-3'-phosphate
  modified_base 3: mod_base = OTHER; note = adenosine-3'-phosphate
  modified_base 4: mod_base = OTHER; note = uridine-3'-phosphate
  modified_base 5: mod_base = OTHER; note = guanosine-3'-phosphate
  modified_base 6: mod_base = OTHER; note = uridine-3'-phosphate
  modified_base 7: mod_base = OTHER; note = uridine-3'-phosphate
  modified_base 8: mod_base = OTHER; note = uridine-3'-phosphate
  modified_base 9: mod_base = OTHER; note = 2'-O-methyluridine-3'-phosphate
  modified_base 10: mod_base = OTHER; note = adenosine-3'-phosphate
  modified_base 11: mod_base = OTHER; note = cytidine-3'-phosphate
  modified_base 12: mod_base = OTHER; note = 2'-O-methyluridine-3'-phosphate
  modified_base 13: mod_base = OTHER; note = adenosine-3'-phosphate
  modified_base 14: mod_base = OTHER; note = guanosine-3'-phosphate
  modified_base 15: mod_base = OTHER; note = adenosine-3'-phosphate
  modified_base 16: mod_base = OTHER; note = uridine-3'-phosphate
  modified_base 17: mod_base = OTHER; note = guanosine-3'-phosphate
  modified_base 18: mod_base = OTHER; note = uridine-3'-phosphate
  modified_base 19: mod_base = OTHER; note = guanosine-3'-phosphate
  modified_base 20: mod_base = OTHER; note = 2'-deoxythymidine-3'-phosphorothioate
  misc_feature 1..19: note = RNA
  misc_feature 20..21: note = DNA
ccatgttttactagatgtgtt

SEQ ID NO: 867 - DNA, 21 bp, synthetic construct
  source 1..21: mol_type = other DNA
  modified_base 1: mod_base = OTHER; note = 2'-O-methylcytidine-3'-phosphate
  modified_base 2: mod_base = OTHER; note = 2'-O-methyluridine-3'-phosphate
  modified_base 3: mod_base = OTHER; note = adenosine-3'-phosphate
  modified_base 4: mod_base = OTHER; note = guanosine-3'-phosphate
  modified_base 5: mod_base = OTHER; note = 2'-O-methyluridine-3'-phosphate
  modified_base 6: mod_base = OTHER; note = adenosine-3'-phosphate
  modified_base 7: mod_base = OTHER; note = adenosine-3'-phosphate
  modified_base 8: mod_base = OTHER; note = adenosine-3'-phosphate
  modified_base 9: mod_base = OTHER; note = adenosine-3'-phosphate
  modified_base 10: mod_base = OTHER; note = 2'-O-methylcytidine-3'-phosphate
  modified_base 11: mod_base = OTHER; note = adenosine-3'-phosphate
  modified_base 12: mod_base = OTHER; note = 2'-O-methyluridine-3'-phosphate
  modified_base 13: mod_base = OTHER; note = guanosine-3'-phosphate
  modified_base 14: mod_base = OTHER; note = guanosine-3'-phosphate
  modified_base 15: mod_base = OTHER; note = adenosine-3'-phosphate
  modified_base 16: mod_base = OTHER; note = guanosine-3'-phosphate
  modified_base 17: mod_base = OTHER; note = 2'-O-methyluridine-3'-phosphate
  modified_base 18: mod_base = OTHER; note = adenosine-3'-phosphate
  modified_base 19: mod_base = OTHER; note = 2'-O-methyluridine-3'-phosphate
  modified_base 20: mod_base = OTHER; note = 2'-deoxythymidine-3'-phosphorothioate
  misc_feature 1..19: note = RNA
  misc_feature 20..21: note = DNA
ctagtaaaacatggagtattt

SEQ ID NO: 868 - DNA, 21 bp, synthetic construct
  source 1..21: mol_type = other DNA
  modified_base 1: mod_base = OTHER; note = adenosine-3'-phosphate
  modified_base 2: mod_base = OTHER; note = 2'-O-methyluridine-3'-phosphate
  modified_base 3: mod_base = OTHER; note = adenosine-3'-phosphate
  modified_base 4: mod_base = OTHER; note = cytidine-3'-phosphate
  modified_base 5: mod_base = OTHER; note = uridine-3'-phosphate
  modified_base 6: mod_base = OTHER; note = cytidine-3'-phosphate
  modified_base 7: mod_base = OTHER; note = 2'-O-methylcytidine-3'-phosphate
  modified_base 8: mod_base = OTHER; note = adenosine-3'-phosphate
  modified_base 9: mod_base = OTHER; note = uridine-3'-phosphate
  modified_base 10: mod_base = OTHER; note = guanosine-3'-phosphate
  modified_base 11: mod_base = OTHER; note = uridine-3'-phosphate
  modified_base 12: mod_base = OTHER; note = uridine-3'-phosphate
  modified_base 13: mod_base = OTHER; note = uridine-3'-phosphate
  modified_base 14: mod_base = OTHER; note = 2'-O-methyluridine-3'-phosphate
  modified_base 15: mod_base = OTHER; note = adenosine-3'-phosphate
  modified_base 16: mod_base = OTHER; note = cytidine-3'-phosphate
  modified_base 17: mod_base = OTHER; note = 2'-O-methyluridine-3'-phosphate
  modified_base 18: mod_base = OTHER; note = adenosine-3'-phosphate
  modified_base 19: mod_base = OTHER; note = guanosine-3'-phosphate
  modified_base 20: mod_base = OTHER; note = 2'-deoxythymidine-3'-phosphorothioate
  misc_feature 1..19: note = RNA
  misc_feature 20..21: note = DNA
atactccatgttttactagtt

SEQ ID NO: 869 - DNA, 1553 bp, Homo sapiens
  source 1..1553: mol_type = genomic DNA
cgaggctccgcaccagccgcgcttctgtccgcctgcagggcattccagaaagatgaggatatttgctgtctttatattcatgacctactggcatttgctgaacgcatttactgtcacggttcccaaggacctatatgtggtagagtatggtagcaatatgacaattgaatgcaaattcccagtagaaaaacaattagacctggctgcactaattgtctattgggaaatggaggataagaacattattcaatttgtgcatggagaggaagacctgaaggttcagcatagtagctacagacagagggcccggctgttgaaggaccagctctccctgggaaatgctgcacttcagatcacagatgtgaaattgcaggatgcaggggtgtaccgctgcatgatcagctatggtggtgccgactacaagcgaattactgtgaaagtcaatgccccatacaacaaaatcaaccaaagaattttggttgtggatccagtcacctctgaacatgaactgacatgtcaggctgagggctaccccaaggccgaagtcatctggacaagcagtgaccatcaagtcctgagtggtaagaccaccaccaccaattccaagagagaggagaagcttttcaatgtgaccagcacactgagaatcaacacaacaactaatgagattttctactgcacttttaggagattagatcctgaggaaaaccatacagctgaattggtcatcccagaactacctctggcacatcctccaaatgaaaggactcacttggtaattctgggagccatcttattatgccttggtgtagcactgacattcatcttccgtttaagaaaagggagaatgatggatgtgaaaaaatgtggcatccaagatacaaactcaaagaagcaaagtgatacacatttggaggagacgtaatccagcattggaacttctgatcttcaagcagggattctcaacctgtggtttaggggttcatcggggctgagcgtgacaagaggaaggaatgggcccgtgggatgcaggcaatgtgggacttaaaaggcccaagcactgaaaatggaacctggcgaaagcagaggaggagaatgaagaaagatggagtcaaacagggagcctggagggagaccttgatactttcaaatgcctgaggggctcatcgacgcctgtgacagggagaaaggatacttctgaacaaggagcctccaagcaaatcatccattgctcatcctaggaagacgggttgagaatccctaatttgagggtcagttcctgcagaagtgccctttgcctccactcaatgcctcaatttgttttctgcatgactgagagtctcagtgttggaacgggacagtatttatgtatgagtttttcctatttattttgagtctgtgaggtcttcttgtcatgtgagtgtggttgtgaatgatttcttttgaagatatattgtagtagatgttacaattttgtcgccaaactaaacttgctgcttaatgatttgctcacatctagtaaaacatggagtatttgtaaaaaaaaaaaaaaa

SEQ ID NO: 870 - DNA, 3653 bp, Mus musculus
  source 1..3653: mol_type = genomic DNA
gaaatcgtggtccccaagcctcatgccaggctgcacttgcacgtcgcgggccagtctcctcgcctgcagatagttcccaaaacatgaggatatttgctggcattatattcacagcctgctgtcacttgctacgggcgtttactatcacggctccaaaggacttgtacgtggtggagtatggcagcaacgtcacgatggagtgcagattccctgtagaacgggagctggacctgcttgcgttagtggtgtactgggaaaaggaagatgagcaagtgattcagtttgtggcaggagaggaggaccttaagcctcagcacagcaacttcagggggagagcctcgctgccaaaggaccagcttttgaagggaaatgctgcccttcagatcacagacgtcaagctgcaggacgcaggcgtttactgctgcataatcagctacggtggtgcggactacaagcgaatcacgctgaaagtcaatgccccataccgcaaaatcaaccagagaatttccgtggatccagccacttctgagcatgaactaatatgtcaggccgagggttatccagaagctgaggtaatctggacaaacagtgaccaccaacccgtgagtgggaagagaagtgtcaccacttcccggacagaggggatgcttctcaatgtgaccagcagtctgagggtcaacgccacagcgaatgatgttttctactgtacgttttggagatcacagccagggcaaaaccacacagcggagctgatcatcccagaactgcctgcaacacatcctccacagaacaggactcactgggtgcttctgggatccatcctgttgttcctcattgtagtgtccacggtcctcctcttcttgagaaaacaagtgagaatgctagatgtggagaaatgtggcgttgaagatacaagctcaaaaaaccgaaatgatacacaattcgaggagacgtaagcagtgttgaaccctctgatcgtcgattggcagcttgtggtctgtgaaagaaagggcccatgggacatgagtccaaagactcaagatggaacctgagggagagaaccaagaaagtgttgggagaggagcctggaacaacggacattttttccagggagacactgctaagcaagttgcccatcagtcgtcttgggaaatggattgagggttcctggcttagcagctggtccttgcacagtgaccttttcctctgctcagtgccgggatgagagatggagtcatgagtgttgaagaataagtgccttctatttattttgagtctgtgtgttctcactttgggcatgtaattatgactggtgaattctgacgacatgatagatcttaagatgtagtcaccaaactcaactgctgcttagcatcctccgtaactactgatacaagcagggaacacagaggtcacctgcttggtttgacaggctcttgctgtctgactcaaataatctttatttttcagtcctcaaggctcttcgatagcagttgttctgtatcagccttataggtgtcaggtatagcactcaacatctcatctcattacaatagcaaccctcatcaccatagcaacagctaacctctgttatcctcacttcatagccaggaagctgagcgactaagtcacttgcccacagagtatcagctctcagatttctgttcttcagccactgtcctttcaggatagaatttgtcgttaagaaattaatttaaaaactgattattgagtagcattgtatatcaatcacaacatgccttgtgcactgtgctggcctctgagcataaagatgtacgccggagtaccggtcggacatgtttatgtgtgttaaatactcagagaaatgttcattaacaaggagcttgcattttagagacactggaaagtaactccagttcattgtctagcattacatttacctcatttgctatccttgccatacagtctcttgttctccatgaagtgtcatgaatcttgttgaatagttcttttattttttaaatgtttctatttaaatgatattgacatctgaggcgatagctcagttggtaaaaccctttcctcacaagtgtgaaaccctgagtcttatccctagaacccacataaaaaacagttgcgtatgtttgtgcatgcttttgatcccagcactagggaggcagaggcaggcagatcctgagctctcattgaccacccagcctagcctacatggttagctccaggcctacaggagctggcagagcctgaaaaacgatgcctagacacacacacacacacacacacacacacacacacacacacacaccatgtactcatagacctaagtgcaccctcctacacatgcacacacatacaattcaaacacaaatcaacagggaattgtctcagaatggtccccaagacaaagaagaagaaaaacaccaaaccagctctattccctcagcctatcctctctactccttcctagaagcaactactattgtttttgtatataaatttacccaacgacagttaatatgtagaatatatattaaagtgtctgtcaatatatattatctctttctttctttcttcctttctttctttctttctttctttctttctttctttctttctttctttcttccttccttccttccttccttccttccttccttcctttctttctttctttctttttttctgtctatctgtacctaaatggttgctcactatgcattttctgtgctcttcgccctttttatttaatgtatggatatttatgctgcttccagaatggatctaaagctctttgtttctaggttttctcccccatccttctaggcatctctcacactgtctaggccagacaccatgtctgctgcctgaatctgtagacaccatttataaagcacgtactcaccgagtttgtatttggcttgttctgtgtctgattaaagggagaccatgagtccccagggtacactgagttaccccagtaccaagggggagccttgtttgtgtctccatggcagaagcaggcctggagccattttggtttcttccttgacttctctcaaacacagacgcctcacttgctcattacaggttctcctttgggaatgtcagcattgctccttgactgctggctgccctggaaggagcccattagctctgtgtgagcccttgacagctactgcctctccttaccacaggggcctctaagatactgttacctagaggtcttgaggatctgtgttctctggggggaggaaaggaggaggaacccagaactttcttacagttttccttgttctgtcacatgtcaagactgaaggaacaggctgggctacgtagtgagatcctgtctcaaaggaaagacgagcatagccgaacccccggtggaaccccctctgttacctgttcacacaagcttattgatgagtctcatgttaatgtcttgtttgtatgaagtttaagaaaatatcgggttgggcaacacattctatttattcattttatttgaaatcttaatgccatctcatggtgttggattggtgtggcactttattcttttgtgttgtgtataaccataaattttattttgcatcagattgtcaatgtattgcattaatttaataaatatttttatttattaaaaaaaaaaaaaaaaa

SEQ ID NO: 871 - DNA, 1080 bp, Rattus norvegicus
  source 1..1080: mol_type = genomic DNA
atgaggatatttgctgtccttatagtcacagcctgcagtcacgtgctagcggcatttaccatcacagctccaaaggacctgtacgtggtggagtatggcagcaatgtcacgatggaatgcagattcccagtagaacagaaattggacctgcttgccttagtggtgtactgggaaaaggaagacaaggaagttattcagtttgtggagggagaggaggacctgaagcctcaacacagcagcttcagggggagagccttcttgccaaaggaccagcttttgaaggggaacgcggtgcttcagatcacagatgtcaagctgcaggacgcaggtgtctactgctgcatgatcagctatggtggagcggactacaagcgaatcacattgaaagtcaacgctccataccgcaaaatcaaccaaagaatttccatggatccagccacttctgagcatgaactaatgtgccaggctgagggttacccagaagccgaagtgatctggacaaacagtgaccaccagtccctgagtggggaaacaactgtcaccacttcccagactgaggagaagcttctcaacgtgaccagcgttctgagggtcaacgcaacagctaatgatgttttccactgtacgttctggagagtacactcaggggagaaccacacggctgaactgatcatcccagaactgcctgtaccacgtctcccacataacaggacacactgggtactcctgggatccgtccttttgttcctcatcgtggggttcaccgtcttcttctgcttgagaaaacaagtgagaatgctagatgtggaaaaatgcggcttcgaagatagaaattcaaagaaccgaaatgttcgaggagacgtaagcagtgttgaaccctctgagcctcgaggcgggattggcagcttgtggtctgtgaaagaaagggcccgtgggacatgggtccagggactcaaaaatggaaccggagaggagaagagaacaaagaaagtgttggaagaggagcctgggacgaaagacatttctacaggagacactgctaagcaagttacccatcagtcatctcgggcaataagttga

SEQ ID NO: 872 - DNA, 1080 bp, Rattus norvegicus; identical to SEQ ID NO: 871
  source 1..1080: mol_type = genomic DNA

SEQ ID NO: 873 - protein, 29 aa, synthetic construct
  REGION 1..29: note = Description of Artificial Sequence: Synthetic peptide
AALEALAEALEALAEALEALAEAAAAGGC

SEQ ID NO: 874 - protein, 30 aa, synthetic construct
  REGION 1..30: note = Description of Artificial Sequence: Synthetic polypeptide
AALAEALAEALAEALAEALAEALAAAAGGC

SEQ ID NO: 875 - protein, 15 aa, synthetic construct
  REGION 1..15: note = Description of Artificial Sequence: Synthetic peptide
ALEALAEALEALAEA

SEQ ID NO: 876 - skipped

SEQ ID NO: 877 - DNA, 21 bp, synthetic construct
  source 1..21: mol_type = other DNA
  modified_base 1: mod_base = OTHER; note = 2'-O-methyluridine-3'-phosphate
  modified_base 2: mod_base = OTHER; note = guanosine-3'-phosphate
  modified_base 3: mod_base = OTHER; note = adenosine-3'-phosphate
  modified_base 4: mod_base = OTHER; note = adenosine-3'-phosphate
  modified_base 5: mod_base = OTHER; note = 2'-O-methyluridine-3'-phosphate
  modified_base 6: mod_base = OTHER; note = adenosine-3'-phosphate
  modified_base 7: mod_base = OTHER; note = 2'-O-methyluridine-3'-phosphate
  modified_base 8: mod_base = OTHER; note = adenosine-3'-phosphate
  modified_base 9: mod_base = OTHER; note = 2'-O-methyluridine-3'-phosphate
  modified_base 10: mod_base = OTHER; note = 2'-O-methylcytidine-3'-phosphate
  modified_base 11: mod_base = OTHER; note = 2'-O-methyluridine-3'-phosphate
  modified_base 12: mod_base = OTHER; note = 2'-O-methyluridine-3'-phosphate
  modified_base 13: mod_base = OTHER; note = adenosine-3'-phosphate
  modified_base 14: mod_base = OTHER; note = adenosine-3'-phosphate
  modified_base 15: mod_base = OTHER; note = 2'-O-methylcytidine-3'-phosphate
  modified_base 16: mod_base = OTHER; note = guanosine-3'-phosphate
  modified_base 17: mod_base = OTHER; note = 2'-O-methylcytidine-3'-phosphate
  modified_base 18: mod_base = OTHER; note = 2'-O-methylcytidine-3'-phosphate
  modified_base 19: mod_base = OTHER; note = adenosine-3'-phosphate
  modified_base 20: mod_base = OTHER; note = 2'-deoxythymidine-3'-phosphorothioate
  misc_feature 1..19: note = RNA
  misc_feature 20..21: note = DNA
tgaatatatcttaacgccatt

SEQ ID NO: 878 - DNA, 21 bp, synthetic construct
  source 1..21: mol_type = other DNA
  modified_base 1: mod_base = OTHER; note = guanosine-3'-phosphate
  modified_base 2: mod_base = OTHER; note = 2'-O-methylcytidine-3'-phosphate
  modified_base 3: mod_base = OTHER; note = 2'-O-methyluridine-3'-phosphate
  modified_base 4: mod_base = OTHER; note = adenosine-3'-phosphate
  modified_base 5: mod_base = OTHER; note = guanosine-3'-phosphate
  modified_base 6: mod_base = OTHER; note = adenosine-3'-phosphate
  modified_base 7: mod_base = OTHER; note = adenosine-3'-phosphate
  modified_base 8: mod_base = OTHER; note = adenosine-3'-phosphate
  modified_base 9: mod_base = OTHER; note = guanosine-3'-phosphate
  modified_base 10: mod_base = OTHER; note = adenosine-3'-phosphate
  modified_base 11: mod_base = OTHER; note = adenosine-3'-phosphate
  modified_base 12: mod_base = OTHER; note = 2'-O-methyluridine-3'-phosphate
  modified_base 13: mod_base = OTHER; note = 2'-O-methylcytidine-3'-phosphate
  modified_base 14: mod_base = OTHER; note = 2'-O-methylcytidine-3'-phosphate
  modified_base 15: mod_base = OTHER; note = 2'-O-methyluridine-3'-phosphate
  modified_base 16: mod_base = OTHER; note = guanosine-3'-phosphate
  modified_base 17: mod_base = OTHER; note = guanosine-3'-phosphate
  modified_base 18: mod_base = OTHER; note = guanosine-3'-phosphate
  modified_base 19: mod_base = OTHER; note = 2'-O-methyluridine-3'-phosphate
  modified_base 20: mod_base = OTHER; note = 2'-deoxythymidine-3'-phosphorothioate
  misc_feature 1..19: note = RNA
  misc_feature 20..21: note = DNA
gctagaaagaatcctgggttt

SEQ ID NO: 879 - DNA, 21 bp, synthetic construct
  source 1..21: mol_type = other DNA
  modified_base 1: mod_base = OTHER; note = guanosine-3'-phosphate
  modified_base 2: mod_base = OTHER; note = guanosine-3'-phosphate
  modified_base 3: mod_base = OTHER; note = adenosine-3'-phosphate
  modified_base 4: mod_base = OTHER; note = guanosine-3'-phosphate
  modified_base 5: mod_base = OTHER; note = 2'-O-methylcytidine-3'-phosphate
  modified_base 6: mod_base = OTHER; note = 2'-O-methyluridine-3'-phosphate
  modified_base 7: mod_base = OTHER; note = adenosine-3'-phosphate
  modified_base 8: mod_base = OTHER; note = 2'-O-methylcytidine-3'-phosphate
  modified_base 9: mod_base = OTHER; note = 2'-O-methyluridine-3'-phosphate
  modified_base 10: mod_base = OTHER; note = guanosine-3'-phosphate
  modified_base 11: mod_base = OTHER; note = 2'-O-methylcytidine-3'-phosphate
  modified_base 12: mod_base = OTHER; note = adenosine-3'-phosphate
  modified_base 13: mod_base = OTHER; note = 2'-O-methyluridine-3'-phosphate
  modified_base 14: mod_base = OTHER; note = guanosine-3'-phosphate
  modified_base 15: mod_base = OTHER; note = 2'-O-methyluridine-3'-phosphate
  modified_base 16: mod_base = OTHER; note = 2'-O-methyluridine-3'-phosphate
  modified_base 17: mod_base = OTHER; note = guanosine-3'-phosphate
  modified_base 18: mod_base = OTHER; note = adenosine-3'-phosphate
  modified_base 19: mod_base = OTHER; note = 2'-O-methyluridine-3'-phosphate
  modified_base 20: mod_base = OTHER; note = 2'-deoxythymidine-3'-phosphorothioate
  misc_feature 1..19: note = RNA
  misc_feature 20..21: note = DNA
ggagctactgcatgttgattt

SEQ ID NO: 880 - DNA, 21 bp, synthetic construct
  source 1..21: mol_type = other DNA
  modified_base 1: mod_base = OTHER; note = adenosine-3'-phosphate
  modified_base 2: mod_base = OTHER; note = guanosine-3'-phosphate
  modified_base 3: mod_base = OTHER; note = 2'-O-methyluridine-3'-phosphate
  modified_base 4: mod_base = OTHER; note = 2'-O-methylcytidine-3'-phosphate
  modified_base 5: mod_base = OTHER; note = 2'-O-methylcytidine-3'-phosphate
  modified_base 6: mod_base = OTHER; note = 2'-O-methyluridine-3'-phosphate
  modified_base 7: mod_base = OTHER; note = 2'-O-methylcytidine-3'-phosphate
  modified_base 8: mod_base = OTHER; note = adenosine-3'-phosphate
  modified_base 9: mod_base = OTHER; note = 2'-O-methyluridine-3'-phosphate
  modified_base 10: mod_base = OTHER; note = adenosine-3'-phosphate
  modified_base 11: mod_base = OTHER; note = 2'-O-methyluridine-3'-phosphate
  modified_base 12: mod_base = OTHER; note = 2'-O-methylcytidine-3'-phosphate
  modified_base 13: mod_base = OTHER; note = adenosine-3'-phosphate
  modified_base 14: mod_base = OTHER; note = adenosine-3'-phosphate
  modified_base 15: mod_base = OTHER; note = adenosine-3'-phosphate
  modified_base 16: mod_base = OTHER; note = 2'-O-methyluridine-3'-phosphate
  modified_base 17: mod_base = OTHER; note = adenosine-3'-phosphate
  modified_base 18: mod_base = OTHER; note = 2'-O-methylcytidine-3'-phosphate
  modified_base 19: mod_base = OTHER; note = adenosine-3'-phosphate
  modified_base 20: mod_base = OTHER; note = 2'-deoxythymidine-3'-phosphorothioate
  misc_feature 1..19: note = RNA
  misc_feature 20..21: note = DNA
agtcctcatatcaaatacatt

SEQ ID NO: 881 - DNA, 21 bp, synthetic construct
  source 1..21: mol_type = other DNA
  modified_base 1: mod_base = OTHER; note = 2'-O-methyluridine-3'-phosphate
  modified_base 2: mod_base = OTHER; note = 2'-O-methylcytidine-3'-phosphate
  modified_base 3: mod_base = OTHER; note = adenosine-3'-phosphate
  modified_base 4: mod_base = OTHER; note = 2'-O-methyluridine-3'-phosphate
  modified_base 5: mod_base = OTHER; note = adenosine-3'-phosphate
  modified_base 6: mod_base = OTHER; note = 2'-O-methyluridine-3'-phosphate
  modified_base 7: mod_base = OTHER; note = 2'-O-methylcytidine-3'-phosphate
  modified_base 8: mod_base = OTHER; note = adenosine-3'-phosphate
  modified_base 9: mod_base = OTHER; note = adenosine-3'-phosphate
  modified_base 10: mod_base = OTHER; note = adenosine-3'-phosphate
  modified_base 11: mod_base = OTHER; note = 2'-O-methyluridine-3'-phosphate
  modified_base 12: mod_base = OTHER; note = adenosine-3'-phosphate
  modified_base 13: mod_base = OTHER; note = 2'-O-methylcytidine-3'-phosphate
  modified_base 14: mod_base = OTHER; note = adenosine-3'-phosphate
  modified_base 15: mod_base = OTHER; note = guanosine-3'-phosphate
  modified_base 16: mod_base = OTHER; note = adenosine-3'-phosphate
  modified_base 17: mod_base = OTHER; note = adenosine-3'-phosphate
  modified_base 18: mod_base = OTHER; note = 2'-O-methylcytidine-3'-phosphate
  modified_base 19: mod_base = OTHER; note = adenosine-3'-phosphate
  modified_base 20: mod_base = OTHER; note = 2'-deoxythymidine-3'-phosphorothioate
  misc_feature 1..19: note = RNA
  misc_feature 20..21: note = DNA
tcatatcaaatacagaacatt

SEQ ID NO: 882 - DNA, 21 bp, synthetic construct
  source 1..21: mol_type = other DNA
  modified_base 1: mod_base = OTHER; note = 2'-O-methylcytidine-3'-phosphate
  modified_base 2: mod_base = OTHER; note = adenosine-3'-phosphate
  modified_base 3: mod_base = OTHER; note = 2'-O-methyluridine-3'-phosphate
  modified_base 4: mod_base = OTHER; note = adenosine-3'-phosphate
  modified_base 5: mod_base = OTHER; note = 2'-O-methyluridine-3'-phosphate
  modified_base 6: mod_base = OTHER; note = 2'-O-methylcytidine-3'-phosphate
  modified_base 7: mod_base = OTHER; note = adenosine-3'-phosphate
  modified_base 8: mod_base = OTHER; note = adenosine-3'-phosphate
  modified_base 9: mod_base = OTHER; note = adenosine-3'-phosphate
  modified_base 10: mod_base = OTHER; note = 2'-O-methyluridine-3'-phosphate
  modified_base 11: mod_base = OTHER; note = adenosine-3'-phosphate
  modified_base 12: mod_base = OTHER; note = 2'-O-methylcytidine-3'-phosphate
  modified_base 13: mod_base = OTHER; note = adenosine-3'-phosphate
  modified_base 14: mod_base = OTHER; note = guanosine-3'-phosphate
  modified_base 15: mod_base = OTHER; note = adenosine-3'-phosphate
  modified_base 16: mod_base = OTHER; note = adenosine-3'-phosphate
  modified_base 17: mod_base = OTHER; note = 2'-O-methylcytidine-3'-phosphate
  modified_base 18: mod_base = OTHER; note = adenosine-3'-phosphate
  modified_base 19: mod_base = OTHER; note = 2'-O-methyluridine-3'-phosphate
  modified_base 20: mod_base = OTHER; note = 2'-deoxythymidine-3'-phosphorothioate
  misc_feature 1..19: note = RNA
  misc_feature 20..21: note = DNA
catatcaaatacagaacattt

SEQ ID NO: 883 - DNA, 21 bp, synthetic construct
  source 1..21: mol_type = other DNA
  modified_base 1: mod_base = OTHER; note = 2'-O-methyluridine-3'-phosphate
  modified_base 2: mod_base = OTHER; note = 2'-O-methylcytidine-3'-phosphate
  modified_base 3: mod_base = OTHER; note = 2'-O-methylcytidine-3'-phosphate
  modified_base 4: mod_base = OTHER; note = 2'-O-methyluridine-3'-phosphate
  modified_base 5: mod_base = OTHER; note = guanosine-3'-phosphate
  modified_base 6: mod_base = OTHER; note = 2'-O-methylcytidine-3'-phosphate
  modified_base 7: mod_base = OTHER; note = 2'-O-methyluridine-3'-phosphate
  modified_base 8: mod_base = OTHER; note = adenosine-3'-phosphate
  modified_base 9: mod_base = OTHER; note = adenosine-3'-phosphate
  modified_base 10: mod_base = OTHER; note = 2'-O-methyluridine-3'-phosphate
  modified_base 11: mod_base = OTHER; note = guanosine-3'-phosphate
  modified_base 12: mod_base = OTHER; note = 2'-O-methyluridine-3'-phosphate
  modified_base 13: mod_base = OTHER; note = 2'-O-methyluridine-3'-phosphate
  modified_base 14: mod_base = OTHER; note = guanosine-3'-phosphate
  modified_base 15: mod_base = OTHER; note = adenosine-3'-phosphate
  modified_base 16: mod_base = OTHER; note = guanosine-3'-phosphate
  modified_base 17: mod_base = OTHER; note = 2'-O-methylcytidine-3'-phosphate
  modified_base 18: mod_base = OTHER; note = 2'-O-methylcytidine-3'-phosphate
  modified_base 19: mod_base = OTHER; note = 2'-O-methyluridine-3'-phosphate
  modified_base 20: mod_base = OTHER; note = 2'-deoxythymidine-3'-phosphorothioate
  misc_feature 1..19: note = RNA
  misc_feature 20..21: note = DNA
tcctgctaatgttgagccttt

SEQ ID NO: 884 - DNA, 21 bp, synthetic construct
  source 1..21: mol_type = other DNA
  modified_base 1: mod_base = OTHER; note = guanosine-3'-phosphate
  modified_base 2: mod_base = OTHER; note = 2'-O-methylcytidine-3'-phosphate
  modified_base 3: mod_base = OTHER; note = 2'-O-methyluridine-3'-phosphate
  modified_base 4: mod_base = OTHER; note = adenosine-3'-phosphate
  modified_base 5: mod_base = OTHER; note = adenosine-3'-phosphate
  modified_base 6: mod_base = OTHER; note = 2'-O-methyluridine-3'-phosphate
  modified_base 7: mod_base = OTHER; note = guanosine-3'-phosphate
  modified_base 8: mod_base = OTHER; note = 2'-O-methyluridine-3'-phosphate
  modified_base 9: mod_base = OTHER; note = 2'-O-methyluridine-3'-phosphate
  modified_base 10: mod_base = OTHER; note = guanosine-3'-phosphate
  modified_base 11: mod_base = OTHER; note = adenosine-3'-phosphate
  modified_base 12: mod_base = OTHER; note = guanosine-3'-phosphate
  modified_base 13: mod_base = OTHER; note = 2'-O-methylcytidine-3'-phosphate
  modified_base 14: mod_base = OTHER; note = 2'-O-methylcytidine-3'-phosphate
  modified_base 15: mod_base = OTHER; note = 2'-O-methyluridine-3'-phosphate
  modified_base 16: mod_base = OTHER; note = guanosine-3'-phosphate
  modified_base 17: mod_base = OTHER; note = guanosine-3'-phosphate
  modified_base 18: mod_base = OTHER; note = adenosine-3'-phosphate
  modified_base 19: mod_base = OTHER; note = adenosine-3'-phosphate
  modified_base 20: mod_base = OTHER; note = 2'-deoxythymidine-3'-phosphorothioate
  misc_feature 1..19: note = RNA
  misc_feature 20..21: note = DNA
gctaatgttgagcctggaatt

SEQ ID NO: 885 - DNA, 21 bp, synthetic construct
  source 1..21: mol_type = other DNA
  modified_base 1: mod_base = OTHER; note = 2'-O-methyluridine-3'-phosphate
  modified_base 2: mod_base = OTHER; note = 2'-O-methylcytidine-3'-phosphate
  modified_base 3: mod_base = OTHER; note = 2'-O-methylcytidine-3'-phosphate
  modified_base 4: mod_base = OTHER; note = 2'-O-methylcytidine-3'-phosphate
  modified_base 5: mod_base = OTHER; note = 2'-O-methyluridine-3'-phosphate
  modified_base 6: mod_base = OTHER; note = adenosine-3'-phosphate
  modified_base 7: mod_base = OTHER; note = adenosine-3'-phosphate
  modified_base 8: mod_base = OTHER; note = guanosine-3'-phosphate
  modified_base 9: mod_base = OTHER; note = guanosine-3'-phosphate
  modified_base 10: mod_base = OTHER; note = adenosine-3'-phosphate
  modified_base 11: mod_base = OTHER; note = adenosine-3'-phosphate
  modified_base 12: mod_base = OTHER; note = 2'-O-methylcytidine-3'-phosphate
  modified_base 13: mod_base = OTHER; note = 2'-O-methyluridine-3'-phosphate
  modified_base 14: mod_base = OTHER; note = guanosine-3'-phosphate
  modified_base 15: mod_base = OTHER; note = 2'-O-methyluridine-3'-phosphate
  modified_base 16: mod_base = OTHER; note = adenosine-3'-phosphate
  modified_base 17: mod_base = OTHER; note = 2'-O-methylcytidine-3'-phosphate
  modified_base 18: mod_base = OTHER; note = adenosine-3'-phosphate
  modified_base 19: mod_base = OTHER; note = 2'-O-methyluridine-3'-phosphate
  modified_base 20: mod_base = OTHER; note = 2'-deoxythymidine-3'-phosphorothioate
  misc_feature 1..19: note = RNA
  misc_feature 20..21: note = DNA
tccctaaggaactgtacattt

SEQ ID NO: 886 - DNA, 21 bp, synthetic construct
  source 1..21: mol_type = other DNA
  modified_base 1: mod_base = OTHER; note = 2'-O-methylcytidine-3'-phosphate
  modified_base 2: mod_base = OTHER; note = 2'-O-methylcytidine-3'-phosphate
  modified_base 3: mod_base = OTHER; note = 2'-O-methylcytidine-3'-phosphate
  modified_base 4: mod_base = OTHER; note = 2'-O-methyluridine-3'-phosphate
  modified_base 5: mod_base = OTHER; note = adenosine-3'-phosphate
  modified_base 6: mod_base = OTHER; note = adenosine-3'-phosphate
  modified_base 7: mod_base = OTHER; note = guanosine-3'-phosphate
  modified_base 8: mod_base = OTHER; note = guanosine-3'-phosphate
  modified_base 9: mod_base = OTHER; note = adenosine-3'-phosphate
  modified_base 10: mod_base = OTHER; note = adenosine-3'-phosphate
  modified_base 11: mod_base = OTHER; note = 2'-O-methylcytidine-3'-phosphate
  modified_base 12: mod_base = OTHER; note = 2'-O-methyluridine-3'-phosphate
  modified_base 13: mod_base = OTHER; note = guanosine-3'-phosphate
  modified_base 14: mod_base = OTHER; note = 2'-O-methyluridine-3'-phosphate
  modified_base 15: mod_base = OTHER; note = adenosine-3'-phosphate
  modified_base 16: mod_base = OTHER; note = 2'-O-methylcytidine-3'-phosphate
  modified_base 17: mod_base = OTHER; note = adenosine-3'-phosphate
  modified_base 18: mod_base = OTHER; note = 2'-O-methyluridine-3'-phosphate
  modified_base 19: mod_base = OTHER; note = adenosine-3'-phosphate
  modified_base 20: mod_base = OTHER; note = 2'-deoxythymidine-3'-phosphorothioate
  misc_feature 1..19: note = RNA
  misc_feature 20..21: note = DNA
ccctaaggaactgtacatatt

SEQ ID NO: 887 - DNA, 21 bp, synthetic construct
  source 1..21: mol_type = other DNA
  modified_base 1: mod_base = OTHER; note = 2'-O-methyluridine-3'-phosphate
  modified_base 2: mod_base = OTHER; note = adenosine-3'-phosphate
  modified_base 3: mod_base = OTHER; note = 2'-O-methylcytidine-3'-phosphate
  modified_base 4: mod_base = OTHER; note = adenosine-3'-phosphate
  modified_base 5: mod_base = OTHER; note = 2'-O-methyluridine-3'-phosphate
  modified_base 6: mod_base = OTHER; note = adenosine-3'-phosphate
  modified_base 7: mod_base = OTHER; note = adenosine-3'-phosphate
  modified_base 8: mod_base = OTHER; note = 2'-O-methyluridine-3'-phosphate
  modified_base 9: mod_base = OTHER; note = adenosine-3'-phosphate
  modified_base 10: mod_base = OTHER; note = guanosine-3'-phosphate
  modified_base 11: mod_base = OTHER; note = adenosine-3'-phosphate
  modified_base 12: mod_base = OTHER; note = guanosine-3'-phosphate
  modified_base 13: mod_base = OTHER; note = 2'-O-methylcytidine-3'-phosphate
  modified_base 14: mod_base = OTHER; note = adenosine-3'-phosphate
  modified_base 15: mod_base = OTHER; note = 2'-O-methyluridine-3'-phosphate
  modified_base 16: mod_base = OTHER; note = guanosine-3'-phosphate
  modified_base 17: mod_base = OTHER; note = guanosine-3'-phosphate
  modified_base 18: mod_base = OTHER; note = 2'-O-methylcytidine-3'-phosphate
  modified_base 19: mod_base = OTHER; note = adenosine-3'-phosphate
  modified_base 20: mod_base = OTHER; note = 2'-deoxythymidine-3'-phosphorothioate
  misc_feature 1..19: note = RNA
  misc_feature 20..21: note = DNA
tacataatagagcatggcatt

SEQ ID NO: 888 - DNA, 21 bp, synthetic construct
  source 1..21: mol_type = other DNA
  modified_base 1: mod_base = OTHER; note = adenosine-3'-phosphate
  modified_base 2: mod_base = OTHER; note = 2'-O-methyluridine-3'-phosphate
  modified_base 3: mod_base = OTHER; note = adenosine-3'-phosphate
  modified_base 4: mod_base = OTHER; note = adenosine-3'-phosphate
  modified_base 5: mod_base = OTHER; note = 2'-O-methyluridine-3'-phosphate
  modified_base 6: mod_base = OTHER; note = adenosine-3'-phosphate
  modified_base 7: mod_base = OTHER; note = guanosine-3'-phosphate
  modified_base 8: mod_base = OTHER; note = adenosine-3'-phosphate
  modified_base 9: mod_base = OTHER; note = guanosine-3'-phosphate
  modified_base 10: mod_base = OTHER; note = 2'-O-methylcytidine-3'-phosphate
  modified_base 11: mod_base = OTHER; note = adenosine-3'-phosphate
  modified_base 12: mod_base = OTHER; note = 2'-O-methyluridine-3'-phosphate
  modified_base 13: mod_base = OTHER; note = guanosine-3'-phosphate
  modified_base 14: mod_base = OTHER; note = guanosine-3'-phosphate
  modified_base 15: mod_base = OTHER; note = 2'-O-methylcytidine-3'-phosphate
  modified_base 16: mod_base = OTHER; note = adenosine-3'-phosphate
  modified_base 17: mod_base = OTHER; note = guanosine-3'-phosphate
  modified_base 18: mod_base = OTHER; note = 2'-O-methylcytidine-3'-phosphate
  modified_base 19: mod_base = OTHER; note = adenosine-3'-phosphate
  modified_base 20: mod_base = OTHER; note = 2'-deoxythymidine-3'-phosphorothioate
  misc_feature 1..19: note = RNA
  misc_feature 20..21: note = DNA
ataatagagcatggcagcatt

SEQ ID NO: 889 - DNA, 21 bp, synthetic construct
  source 1..21: mol_type = other DNA
  modified_base 1: mod_base = OTHER; note = 2'-O-methyluridine-3'-phosphate
  modified_base 2: mod_base = OTHER; note = adenosine-3'-phosphate
  modified_base 3: mod_base = OTHER; note = adenosine-3'-phosphate
  modified_base 4: mod_base = OTHER; note = 2'-O-methyluridine-3'-phosphate
  modified_base 5: mod_base = OTHER; note = adenosine-3'-phosphate
  modified_base 6: mod_base = OTHER; note = guanosine-3'-phosphate
  modified_base 7: mod_base = OTHER; note = adenosine-3'-phosphate
  modified_base 8: mod_base = OTHER; note = guanosine-3'-phosphate
  modified_base 9: mod_base = OTHER; note = 2'-O-methylcytidine-3'-phosphate
  modified_base 10: mod_base = OTHER; note = adenosine-3'-phosphate
  modified_base 11: mod_base = OTHER; note = 2'-O-methyluridine-3'-phosphate
  modified_base 12: mod_base = OTHER; note = guanosine-3'-phosphate
  modified_base 13: mod_base = OTHER; note = guanosine-3'-phosphate
  modified_base 14: mod_base = OTHER; note = 2'-O-methylcytidine-3'-phosphate
  modified_base 15: mod_base = OTHER; note = adenosine-3'-phosphate
  modified_base 16: mod_base = OTHER; note = guanosine-3'-phosphate
  modified_base 17: mod_base = OTHER; note = 2'-O-methylcytidine-3'-phosphate
  modified_base 18: mod_base = OTHER; note = adenosine-3'-phosphate
  modified_base 19: mod_base = OTHER; note = adenosine-3'-phosphate
  modified_base 20: mod_base = OTHER; note = 2'-deoxythymidine-3'-phosphorothioate
  misc_feature 1..19: note = RNA
  misc_feature 20..21: note = DNA
taatagagcatggcagcaatt

SEQ ID NO: 890 - DNA, 21 bp, synthetic construct
  source 1..21: mol_type = other DNA
  modified_base 1: mod_base = OTHER; note = adenosine-3'-phosphate
  modified_base 2: mod_base = OTHER; note = adenosine-3'-phosphate
  modified_base 3: mod_base = OTHER; note = 2'-O-methyluridine-3'-phosphate
  modified_base 4: mod_base = OTHER; note = adenosine-3'-phosphate
  modified_base 5: mod_base = OTHER; note = guanosine-3'-phosphate
  modified_base 6: mod_base = OTHER; note = adenosine-3'-phosphate
  modified_base 7: mod_base = OTHER; note = guanosine-3'-phosphate
  modified_base 8: mod_base = OTHER; note = 2'-O-methylcytidine-3'-phosphate
  modified_base 9: mod_base = OTHER; note = adenosine-3'-phosphate
  modified_base 10: mod_base = OTHER; note = 2'-O-methyluridine-3'-phosphate
  modified_base 11: mod_base = OTHER; note = guanosine-3'-phosphate
  modified_base 12: mod_base = OTHER; note = guanosine-3'-phosphate
  modified_base 13: mod_base = OTHER; note = 2'-O-methylcytidine-3'-phosphate
  modified_base 14: mod_base = OTHER; note = adenosine-3'-phosphate
  modified_base 15: mod_base = OTHER; note = guanosine-3'-phosphate
  modified_base 16: mod_base = OTHER; note = 2'-O-methylcytidine-3'-phosphate
  modified_base 17: mod_base = OTHER; note = adenosine-3'-phosphate
  modified_base 18: mod_base = OTHER; note = adenosine-3'-phosphate
  modified_base 19: mod_base = OTHER; note = 2'-O-methyluridine-3'-phosphate
  modified_base 20: mod_base = OTHER; note = 2'-deoxythymidine-3'-phosphorothioate
  misc_feature 1..19: note = RNA
  misc_feature 20..21: note = DNA
aatagagcatggcagcaattt

SEQ ID NO: 891 - DNA, 21 bp, synthetic construct
  source 1..21: mol_type = other DNA
  modified_base 1: mod_base = OTHER; note = guanosine-3'-phosphate
  modified_base 2: mod_base = OTHER; note = adenosine-3'-phosphate
  modified_base 3: mod_base = OTHER; note = 2'-O-methylcytidine-3'-phosphate
  modified_base 4: mod_base = OTHER; note = 2'-O-methylcytidine-3'-phosphate
  modified_base 5: mod_base = OTHER; note = 2'-O-methylcytidine-3'-phosphate
  modified_base 6: mod_base = OTHER; note = 2'-O-methyluridine-3'-phosphate
  modified_base 7: mod_base = OTHER; note = guanosine-3'-phosphate
  modified_base 8: mod_base = OTHER; note = guanosine-3'-phosphate
  modified_base 9: mod_base = OTHER; note = adenosine-3'-phosphate
  modified_base 10: mod_base = OTHER; note = adenosine-3'-phosphate
  modified_base 11: mod_base = OTHER; note = 2'-O-methyluridine-3'-phosphate
  modified_base 12: mod_base = OTHER; note = guanosine-3'-phosphate
  modified_base 13: mod_base = OTHER; note = 2'-O-methylcytidine-3'-phosphate
  modified_base 14: mod_base = OTHER; note = adenosine-3'-phosphate
  modified_base 15: mod_base = OTHER; note = adenosine-3'-phosphate
  modified_base 16: mod_base = OTHER; note = 2'-O-methylcytidine-3'-phosphate
  modified_base 17: mod_base = OTHER; note = 2'-O-methyluridine-3'-phosphate
  modified_base 18: mod_base = OTHER; note = 2'-O-methyluridine-3'-phosphate
  modified_base 19: mod_base = OTHER; note = 2'-O-methyluridine-3'-phosphate
  modified_base 20: mod_base = OTHER; note = 2'-deoxythymidine-3'-phosphorothioate
  misc_feature 1..19: note = RNA
  misc_feature 20..21: note = DNA
gaccctggaatgcaacttttt

SEQ ID NO: 892 - DNA, 21 bp, synthetic construct
  source 1..21: mol_type = other DNA
  modified_base 1: mod_base = OTHER; note = 2'-O-methylcytidine-3'-phosphate
  modified_base 2: mod_base = OTHER; note = adenosine-3'-phosphate
  modified_base 3: mod_base = OTHER; note = adenosine-3'-phosphate
  modified_base 4: mod_base = OTHER; note = 2'-O-methyluridine-3'-phosphate
  modified_base 5: mod_base = OTHER; note = adenosine-3'-phosphate
  modified_base 6: mod_base = OTHER; note = adenosine-3'-phosphate
  modified_base 7: mod_base = OTHER; note = 2'-O-methylcytidine-3'-phosphate
  modified_base 8: mod_base = OTHER; note = adenosine-3'-phosphate
  modified_base 9: mod_base = OTHER; note = guanosine-3'-phosphate
  modified_base 10: mod_base = OTHER; note = 2'-O-methylcytidine-3'-phosphate
  modified_base 11: mod_base = OTHER; note = 2'-O-methylcytidine-3'-phosphate
  modified_base 12: mod_base = OTHER; note = adenosine-3'-phosphate
  modified_base 13: mod_base = OTHER; note = guanosine-3'-phosphate
  modified_base 14: mod_base = OTHER; note = 2'-O-methyluridine-3'-phosphate
  modified_base 15: mod_base = OTHER; note = 2'-O-methyluridine-3'-phosphate
  modified_base 16: mod_base = OTHER; note = 2'-O-methyluridine-3'-phosphate
  modified_base 17: mod_base = OTHER; note = guanosine-3'-phosphate
  modified_base 18: mod_base = OTHER; note = 2'-O-methylcytidine-3'-phosphate
  modified_base 19: mod_base = OTHER; note = adenosine-3'-phosphate
  modified_base 20: mod_base = OTHER; note = 2'-deoxythymidine-3'-phosphorothioate
  misc_feature 1..19: note = RNA
  misc_feature 20..21: note = DNA
caataacagccagtttgcatt

SEQ ID NO: 893 - DNA, 21 bp, synthetic construct
  source 1..21: mol_type = other DNA
  modified_base 1: mod_base = OTHER; note = adenosine-3'-phosphate
  modified_base 2: mod_base = OTHER; note = 2'-O-methyluridine-3'-phosphate
  modified_base 3: mod_base = OTHER; note = adenosine-3'-phosphate
  modified_base 4: mod_base = OTHER; note = adenosine-3'-phosphate
  modified_base 5: mod_base = OTHER; note = 2'-O-methylcytidine-3'-phosphate
  modified_base 6: mod_base = OTHER; note = adenosine-3'-phosphate
  modified_base 7: mod_base = OTHER; note = guanosine-3'-phosphate
  modified_base 8: mod_base = OTHER; note = 2'-O-methylcytidine-3'-phosphate
  modified_base 9: mod_base = OTHER; note = 2'-O-methylcytidine-3'-phosphate
  modified_base 10: mod_base = OTHER; note = adenosine-3'-phosphate
  modified_base 11: mod_base = OTHER; note = guanosine-3'-phosphate
  modified_base 12: mod_base = OTHER; note = 2'-O-methyluridine-3'-phosphate
  modified_base 13: mod_base = OTHER; note = 2'-O-methyluridine-3'-phosphate
  modified_base 14: mod_base = OTHER; note = 2'-O-methyluridine-3'-phosphate
  modified_base 15: mod_base = OTHER; note = guanosine-3'-phosphate
  modified_base 16: mod_base = OTHER; note = 2'-O-methylcytidine-3'-phosphate
  modified_base 17: mod_base = OTHER; note = adenosine-3'-phosphate
  modified_base 18: mod_base = OTHER; note = adenosine-3'-phosphate
  modified_base 19: mod_base = OTHER; note = adenosine-3'-phosphate
  modified_base 20: mod_base = OTHER; note = 2'-deoxythymidine-3'-phosphorothioate
  misc_feature 1..19: note = RNA
  misc_feature 20..21: note = DNA
ataacagccagtttgcaaatt

SEQ ID NO: 894 - DNA, 21 bp, synthetic construct
  source 1..21: mol_type = other DNA
  modified_base 1: mod_base = OTHER; note = 2'-O-methyluridine-3'-phosphate
  modified_base 2: mod_base = OTHER; note = 2'-O-methylcytidine-3'-phosphate
  modified_base 3: mod_base = OTHER; note = 2'-O-methylcytidine-3'-phosphate
  modified_base 4: mod_base = OTHER; note = adenosine-3'-phosphate
  modified_base 5: mod_base = OTHER; note = 2'-O-methylcytidine-3'-phosphate
  modified_base 6: mod_base = OTHER; note = adenosine-3'-phosphate
  modified_base 7: mod_base = OTHER; note = 2'-O-methyluridine-3'-phosphate
  modified_base 8: mod_base = OTHER; note = adenosine-3'-phosphate
  modified_base 9: mod_base = OTHER; note = 2'-O-methylcytidine-3'-phosphate
  modified_base 10: mod_base = OTHER; note = 2'-O-methylcytidine-3'-phosphate
  modified_base 11: mod_base = OTHER; note = 2'-O-methyluridine-3'-phosphate
  modified_base 12: mod_base = OTHER; note = 2'-O-methylcytidine-3'-phosphate
  modified_base 13: mod_base = OTHER; note = adenosine-3'-phosphate
  modified_base 14: mod_base = OTHER; note = adenosine-3'-phosphate
  modified_base 15: mod_base = OTHER; note = guanosine-3'-phosphate
  modified_base 16: mod_base = OTHER; note = 2'-O-methyluridine-3'-phosphate
  modified_base 17: mod_base = OTHER; note = 2'-O-methylcytidine-3'-phosphate
  modified_base 18: mod_base = OTHER; note = 2'-O-methylcytidine-3'-phosphate
  modified_base 19: mod_base = OTHER; note = adenosine-3'-phosphate
  modified_base 20: mod_base = OTHER; note = 2'-deoxythymidine-3'-phosphorothioate
  misc_feature 1..19: note = RNA
  misc_feature 20..21: note = DNA
tccacatacctcaagtccatt

SEQ ID NO: 895 - DNA, 21 bp, synthetic construct
  source 1..21: mol_type = other DNA
  modified_base 1: mod_base = OTHER; note = adenosine-3'-phosphate
  modified_base 2: mod_base = OTHER; note = 2'-O-methylcytidine-3'-phosphate
  modified_base 3: mod_base = OTHER; note = 2'-O-methylcytidine-3'-phosphate
  modified_base 4: mod_base = OTHER; note = adenosine-3'-phosphate
  modified_base 5: mod_base = OTHER; note = adenosine-3'-phosphate
  modified_base 6: mod_base = OTHER; note = 2'-O-methyluridine-3'-phosphate
  modified_base 7: mod_base = OTHER; note = guanosine-3'-phosphate
  modified_base 8: mod_base = OTHER; note = 2'-O-methylcytidine-3'-phosphate
  modified_base 9: mod_base = OTHER; note = adenosine-3'-phosphate
  modified_base 10: mod_base = OTHER; note = 2'-O-methyluridine-3'-phosphate
  modified_base 11: mod_base = OTHER; note = adenosine-3'-phosphate
  modified_base 12: mod_base = OTHER; note = adenosine-3'-phosphate
  modified_base 13: mod_base = OTHER; note = 2'-O-methyluridine-3'-phosphate
  modified_base 14: mod_base = OTHER; note = 2'-O-methylcytidine-3'-phosphate
  modified_base 15: mod_base = OTHER; note = adenosine-3'-phosphate
  modified_base 16: mod_base = OTHER; note = 2'-O-methyluridine-3'-phosphate
  modified_base 17: mod_base = OTHER; note = 2'-O-methylcytidine-3'-phosphate
  modified_base 18: mod_base = OTHER; note = 2'-O-methyluridine-3'-phosphate
  modified_base 19: mod_base = OTHER; note = adenosine-3'-phosphate
  modified_base 20: mod_base = OTHER; note = 2'-deoxythymidine-3'-phosphorothioate
  misc_feature 1..19: note = RNA
  misc_feature 20..21: note = DNA
accaatgcataatcatctatt

SEQ ID NO: 896 - DNA, 21 bp, synthetic construct
  source 1..21: mol_type = other DNA
  modified_base 1: mod_base = OTHER; note = guanosine-3'-phosphate
  modified_base 2: mod_base = OTHER; note = guanosine-3'-phosphate
  modified_base 3: mod_base = OTHER; note = adenosine-3'-phosphate
  modified_base 4: mod_base = OTHER; note = 2'-O-methylcytidine-3'-phosphate
  modified_base 5: mod_base = OTHER; note = 2'-O-methyluridine-3'-phosphate
  modified_base 6: mod_base = OTHER; note = adenosine-3'-phosphate
  modified_base 7: mod_base = OTHER; note = 2'-O-methylcytidine-3'-phosphate
  modified_base 8: mod_base = OTHER; note = adenosine-3'-phosphate
  modified_base 9: mod_base = OTHER; note = adenosine-3'-phosphate
  modified_base 10: mod_base = OTHER; note = guanosine-3'-phosphate
  modified_base 11: mod_base = OTHER; note = 2'-O-methyluridine-3'-phosphate
  modified_base 12: mod_base = OTHER; note = adenosine-3'-phosphate
  modified_base 13: mod_base = OTHER; note = 2'-O-methylcytidine-3'-phosphate
  modified_base 14: mod_base = OTHER; note = 2'-O-methylcytidine-3'-phosphate
  modified_base 15: mod_base = OTHER; note = 2'-O-methyluridine-3'-phosphate
  modified_base 16: mod_base = OTHER; note = guanosine-3'-phosphate
  modified_base 17: mod_base = OTHER; note = adenosine-3'-phosphate
  modified_base 18: mod_base = OTHER; note = 2'-O-methylcytidine-3'-phosphate
  modified_base 19: mod_base = OTHER; note = 2'-O-methyluridine-3'-phosphate
  modified_base 20: mod_base = OTHER; note = 2'-deoxythymidine-3'-phosphorothioate
  misc_feature 1..19: note = RNA
  misc_feature 20..21: note = DNA
ggactacaagtacctgacttt

SEQ ID NO: 897 - DNA, 21 bp, synthetic construct
  source 1..21: mol_type = other DNA
  modified_base 1: mod_base = OTHER; note = adenosine-3'-phosphate
  modified_base 2: mod_base = OTHER; note = 2'-O-methylcytidine-3'-phosphate
  modified_base 3: mod_base = OTHER; note = 2'-O-methyluridine-3'-phosphate
  modified_base 4: mod_base = OTHER; note = adenosine-3'-phosphate
  modified_base 5: mod_base = OTHER; note = 2'-O-methylcytidine-3'-phosphate
  modified_base 6: mod_base = OTHER; note = adenosine-3'-phosphate
  modified_base 7: mod_base = OTHER; note = adenosine-3'-phosphate
  modified_base 8: mod_base = OTHER; note = guanosine-3'-phosphate
  modified_base 9: mod_base = OTHER; note = 2'-O-methyluridine-3'-phosphate
  modified_base 10: mod_base = OTHER; note = adenosine-3'-phosphate
  modified_base 11: mod_base = OTHER; note = 2'-O-methylcytidine-3'-phosphate
  modified_base 12: mod_base = OTHER; note = 2'-O-methylcytidine-3'-phosphate
  modified_base 13: mod_base = OTHER; note = 2'-O-methyluridine-3'-phosphate
  modified_base 14: mod_base = OTHER; note = guanosine-3'-phosphate
  modified_base 15: mod_base = OTHER; note = adenosine-3'-phosphate
  modified_base 16: mod_base = OTHER; note = 2'-O-methylcytidine-3'-phosphate
  modified_base 17: mod_base = OTHER; note = 2'-O-methyluridine-3'-phosphate
  modified_base 18: mod_base = OTHER; note = 2'-O-methylcytidine-3'-phosphate
  modified_base 19: mod_base = OTHER; note = 2'-O-methyluridine-3'-phosphate
  modified_base 20: mod_base = OTHER; note = 2'-deoxythymidine-3'-phosphorothioate
  misc_feature 1..19: note = RNA
  misc_feature 20..21: note = DNA
actacaagtacctgactcttt

SEQ ID NO: 898 - DNA, 21 bp, synthetic construct
  source 1..21: mol_type = other DNA
  modified_base 1: mod_base = OTHER; note = guanosine-3'-phosphate
  modified_base 2: mod_base = OTHER; note = 2'-O-methyluridine-3'-phosphate
  modified_base 3: mod_base = OTHER; note = 2'-O-methylcytidine-3'-phosphate
  modified_base 4: mod_base = OTHER; note = adenosine-3'-phosphate
  modified_base 5: mod_base = OTHER; note = adenosine-3'-phosphate
  modified_base 6: mod_base = OTHER; note = adenosine-3'-phosphate
  modified_base 7: mod_base = OTHER; note = guanosine-3'-phosphate
  modified_base 8: mod_base = OTHER; note = 2'-O-methylcytidine-3'-phosphate
  modified_base 9: mod_base = OTHER; note = 2'-O-methyluridine-3'-phosphate
  modified_base 10: mod_base = OTHER; note = 2'-O-methyluridine-3'-phosphate
  modified_base 11: mod_base = OTHER; note = 2'-O-methylcytidine-3'-phosphate
  modified_base 12: mod_base = OTHER; note = 2'-O-methylcytidine-3'-phosphate
  modified_base 13: mod_base = OTHER; note = 2'-O-methyluridine-3'-phosphate
  modified_base 14: mod_base = OTHER; note = adenosine-3'-phosphate
  modified_base 15: mod_base = OTHER; note = 2'-O-methylcytidine-3'-phosphate
  modified_base 16: mod_base = OTHER; note = adenosine-3'-phosphate
  modified_base 17: mod_base = OTHER; note = guanosine-3'-phosphate
  modified_base 18: mod_base = OTHER; note = guanosine-3'-phosphate
  modified_base 19: mod_base = OTHER; note = adenosine-3'-phosphate
  modified_base 20: mod_base = OTHER; note = 2'-deoxythymidine-3'-phosphorothioate
  misc_feature 1..19: note = RNA
  misc_feature 20..21: note = DNA
gtcaaagcttcctacaggatt

SEQ ID NO: 899 - DNA, 21 bp, synthetic construct
  source 1..21: mol_type = other DNA
  modified_base 1: mod_base = OTHER; note = 2'-O-methylcytidine-3'-phosphate
  modified_base 2: mod_base = OTHER; note = adenosine-3'-phosphate
  modified_base 3: mod_base = OTHER; note = 2'-O-methylcytidine-3'-phosphate
  modified_base 4: mod_base = OTHER; note = 2'-O-methyluridine-3'-phosphate
  modified_base 5: mod_base = OTHER; note = 2'-O-methylcytidine-3'-phosphate
  modified_base 6: mod_base = OTHER; note = adenosine-3'-phosphate
  modified_base 7: mod_base = OTHER; note = 2'-O-methylcytidine-3'-phosphate
  modified_base 8: mod_base = OTHER; note = adenosine-3'-phosphate
  modified_base 9: mod_base = OTHER; note = 2'-O-methyluridine-3'-phosphate
  modified_base 10: mod_base = OTHER; note = 2'-O-methylcytidine-3'-phosphate
  modified_base 11: mod_base = OTHER; note = 2'-O-methylcytidine-3'-phosphate
  modified_base 12: mod_base = OTHER; note = 2'-O-methyluridine-3'-phosphate
  modified_base 13: mod_base = OTHER; note = adenosine-3'-phosphate
  modified_base 14: mod_base = OTHER; note = adenosine-3'-phosphate
  modified_base 15: mod_base = OTHER; note = adenosine-3'-phosphate
  modified_base 16: mod_base = OTHER; note = guanosine-3'-phosphate
  modified_base 17: mod_base = OTHER; note = guanosine-3'-phosphate
  modified_base 18: mod_base = OTHER; note = 2'-O-methyluridine-3'-phosphate
  modified_base 19: mod_base = OTHER; note = 2'-O-methyluridine-3'-phosphate
  modified_base 20: mod_base = OTHER; note = 2'-deoxythymidine-3'-phosphorothioate
  misc_feature 1..19: note = RNA
  misc_feature 20..21: note = DNA
cactcacatcctaaaggtttt

SEQ ID NO: 900 - DNA, 21 bp, synthetic construct
  source 1..21: mol_type = other DNA
  modified_base 1: mod_base = OTHER; note = 2'-O-methyluridine-3'-phosphate
  modified_base 2: mod_base = OTHER; note = 2'-O-methylcytidine-3'-phosphate
  modified_base 3: mod_base = OTHER; note = adenosine-3'-phosphate
  modified_base 4: mod_base = OTHER; note = 2'-O-methylcytidine-3'-phosphate
  modified_base 5: mod_base = OTHER; note = adenosine-3'-phosphate
  modified_base 6: mod_base = OTHER; note = 2'-O-methyluridine-3'-phosphate
  modified_base 7: mod_base = OTHER; note = 2'-O-methylcytidine-3'-phosphate
  modified_base 8: mod_base = OTHER; note = 2'-O-methylcytidine-3'-phosphate
  modified_base 9: mod_base = OTHER; note = 2'-O-methyluridine-3'-phosphate
  modified_base 10: mod_base = OTHER; note = adenosine-3'-phosphate
  modified_base 11: mod_base = OTHER; note = adenosine-3'-phosphate
  modified_base 12: mod_base = OTHER; note = adenosine-3'-phosphate
  modified_base 13: mod_base = OTHER; note = guanosine-3'-phosphate
  modified_base 14: mod_base = OTHER; note = guanosine-3'-phosphate
  modified_base 15: mod_base = OTHER; note = 2'-O-methyluridine-3'-phosphate
  modified_base 16: mod_base = OTHER; note = 2'-O-methyluridine-3'-phosphate
  modified_base 17: mod_base = OTHER; note = 2'-O-methylcytidine-3'-phosphate
  modified_base 18: mod_base = OTHER; note = 2'-O-methylcytidine-3'-phosphate
  modified_base 19: mod_base = OTHER; note = adenosine-3'-phosphate
  modified_base 20: mod_base = OTHER; note = 2'-deoxythymidine-3'-phosphorothioate
  misc_feature 1..19: note = RNA
  misc_feature 20..21: note = DNA
tcacatcctaaaggttccatt

SEQ ID NO: 901 - DNA, 21 bp, synthetic construct
  source 1..21: mol_type = other DNA
  modified_base 1: mod_base = OTHER; note = uridine-3'-phosphate
  modified_base 2: mod_base = OTHER; note = guanosine-3'-phosphate
  modified_base 3: mod_base = OTHER; note = guanosine-3'-phosphate
  modified_base 4: mod_base = OTHER; note = cytidine-3'-phosphate
  modified_base 5: mod_base = OTHER; note = guanosine-3'-phosphate
  modified_base 6: mod_base = OTHER; note = uridine-3'-phosphate
  modified_base 7: mod_base = OTHER; note = 2'-O-methyluridine-3'-phosphate
  modified_base 8: mod_base = OTHER; note = adenosine-3'-phosphate
  modified_base 9: mod_base = OTHER; note = adenosine-3'-phosphate
  modified_base 10: mod_base = OTHER; note = guanosine-3'-phosphate
  modified_base 11: mod_base = OTHER; note = adenosine-3'-phosphate
  modified_base 12: mod_base = OTHER; note = 2'-O-methyluridine-3'-phosphate
  modified_base 13: mod_base = OTHER; note = adenosine-3'-phosphate
  modified_base 14: mod_base = OTHER; note = 2'-O-methyluridine-3'-phosphate
  modified_base 15: mod_base = OTHER; note = adenosine-3'-phosphate
  modified_base 16: mod_base = OTHER; note = uridine-3'-phosphate
  modified_base 17: mod_base = OTHER; note = uridine-3'-phosphate
  modified_base 18: mod_base = OTHER; note = 2'-O-methylcytidine-3'-phosphate
  modified_base 19: mod_base = OTHER; note = adenosine-3'-phosphate
  modified_base 20: mod_base = OTHER; note = 2'-deoxythymidine-3'-phosphorothioate
  misc_feature 1..19: note = RNA
  misc_feature 20..21: note = DNA
tggcgttaagatatattcatt

SEQ ID NO: 902 - DNA, 21 bp, synthetic construct
  source 1..21: mol_type = other DNA
  modified_base 1: mod_base = OTHER; note = adenosine-3'-phosphate
  modified_base 2: mod_base = OTHER; note = cytidine-3'-phosphate
  modified_base 3: mod_base = OTHER; note = cytidine-3'-phosphate
  modified_base 4: mod_base = OTHER; note = 2'-O-methylcytidine-3'-phosphate
  modified_base 5: mod_base = OTHER; note = adenosine-3'-phosphate
  modified_base 6: mod_base = OTHER; note = guanosine-3'-phosphate
  modified_base 7: mod_base = OTHER; note = guanosine-3'-phosphate
  modified_base 8: mod_base = OTHER; note = adenosine-3'-phosphate
  modified_base 9: mod_base = OTHER; note = uridine-3'-phosphate
  modified_base 10: mod_base = OTHER; note = uridine-3'-phosphate
  modified_base 11: mod_base = OTHER; note = cytidine-3'-phosphate
  modified_base 12: mod_base = OTHER; note = uridine-3'-phosphate
  modified_base 13: mod_base = OTHER; note = uridine-3'-phosphate
  modified_base 14: mod_base = OTHER; note = uridine-3'-phosphate
  modified_base 15: mod_base = OTHER; note = cytidine-3'-phosphate
  modified_base 16: mod_base = OTHER; note = 2'-O-methyluridine-3'-phosphate
  modified_base 17: mod_base = OTHER; note = adenosine-3'-phosphate
  modified_base 18: mod_base = OTHER; note = guanosine-3'-phosphate
  modified_base 19: mod_base = OTHER; note = cytidine-3'-phosphate
  modified_base 20: mod_base = OTHER; note = 2'-deoxythymidine-3'-phosphorothioate
  misc_feature 1..19: note = RNA
  misc_feature 20..21: note = DNA
acccaggattctttctagctt

SEQ ID NO: 903 - DNA, 21 bp, synthetic construct
  source 1..21: mol_type = other DNA
  modified_base 1: mod_base = OTHER; note = adenosine-3'-phosphate
  modified_base 2: mod_base = OTHER; note = uridine-3'-phosphate
  modified_base 3: mod_base = OTHER; note = 2'-O-methylcytidine-3'-phosphate
  modified_base 4: mod_base = OTHER; note = adenosine-3'-phosphate
  modified_base 5: mod_base = OTHER; note = adenosine-3'-phosphate
  modified_base 6: mod_base = OTHER; note = 2'-O-methylcytidine-3'-phosphate
  modified_base 7: mod_base = OTHER; note = adenosine-3'-phosphate
  modified_base 8: mod_base = OTHER; note = uridine-3'-phosphate
  modified_base 9: mod_base = OTHER; note = guanosine-3'-phosphate
  modified_base 10: mod_base = OTHER; note = 2'-O-methylcytidine-3'-phosphate
  modified_base 11: mod_base = OTHER; note = adenosine-3'-phosphate
  modified_base 12: mod_base = OTHER; note = guanosine-3'-phosphate
  modified_base 13: mod_base = OTHER; note = 2'-O-methyluridine-3'-phosphate
  modified_base 14: mod_base = OTHER; note = adenosine-3'-phosphate
  modified_base 15: mod_base = OTHER; note = guanosine-3'-phosphate
  modified_base 16: mod_base = OTHER; note = cytidine-3'-phosphate
  modified_base 17: mod_base = OTHER; note = uridine-3'-phosphate
  modified_base 18: mod_base = OTHER; note = cytidine-3'-phosphate
  modified_base 19: mod_base = OTHER; note = cytidine-3'-phosphate
  modified_base 20: mod_base = OTHER; note = 2'-deoxythymidine-3'-phosphorothioate
  misc_feature 1..19: note = RNA
  misc_feature 20..21: note = DNA
atcaacatgcagtagctcctt

SEQ ID NO: 904 - DNA, 21 bp, synthetic construct
  source 1..21: mol_type = other DNA
  modified_base 1: mod_base = OTHER; note = uridine-3'-phosphate
  modified_base 2: mod_base = OTHER; note = guanosine-3'-phosphate
  modified_base 3: mod_base = OTHER; note = 2'-O-methyluridine-3'-phosphate
  modified_base 4: mod_base = OTHER; note = adenosine-3'-phosphate
  modified_base 5: mod_base = OTHER; note = uridine-3'-phosphate
  modified_base 6: mod_base = OTHER; note = uridine-3'-phosphate
  modified_base 7: mod_base = OTHER; note = uridine-3'-phosphate
  modified_base 8: mod_base = OTHER; note = guanosine-3'-phosphate
  modified_base 9: mod_base = OTHER; note = adenosine-3'-phosphate
  modified_base 10: mod_base = OTHER; note = 2'-O-methyluridine-3'-phosphate
  modified_base 11: mod_base = OTHER; note = adenosine-3'-phosphate
  modified_base 12: mod_base = OTHER; note = uridine-3'-phosphate
  modified_base 13: mod_base = OTHER; note = guanosine-3'-phosphate
  modified_base 14: mod_base = OTHER; note = adenosine-3'-phosphate
  modified_base 15: mod_base = OTHER; note = guanosine-3'-phosphate
  modified_base 16: mod_base = OTHER; note = guanosine-3'-phosphate
  modified_base 17: mod_base = OTHER; note = adenosine-3'-phosphate
  modified_base 18: mod_base = OTHER; note = cytidine-3'-phosphate
  modified_base 19: mod_base = OTHER; note = uridine-3'-phosphate
  modified_base 20: mod_base = OTHER; note = 2'-deoxythymidine-3'-phosphorothioate
  misc_feature 1..19: note = RNA
  misc_feature 20..21: note = DNA
tgtatttgatatgaggacttt

SEQ ID NO: 905 - DNA, 21 bp, synthetic construct
  source 1..21: mol_type = other DNA
  modified_base 1: mod_base = OTHER; note = uridine-3'-phosphate
  modified_base 2: mod_base = OTHER; note = guanosine-3'-phosphate
  modified_base 3: mod_base = OTHER; note = uridine-3'-phosphate
  modified_base 4: mod_base = OTHER; note = uridine-3'-phosphate
  modified_base 5: mod_base = OTHER; note = cytidine-3'-phosphate
  modified_base 6: mod_base = OTHER; note = uridine-3'-phosphate
  modified_base 7: mod_base = OTHER; note = guanosine-3'-phosphate
  modified_base 8: mod_base = OTHER; note = 2'-O-methyluridine-3'-phosphate
  modified_base 9: mod_base = OTHER; note = adenosine-3'-phosphate
  modified_base 10: mod_base = OTHER; note = uridine-3'-phosphate
  modified_base 11: mod_base = OTHER; note = uridine-3'-phosphate
  modified_base 12: mod_base = OTHER; note = uridine-3'-phosphate
  modified_base 13: mod_base = OTHER; note = guanosine-3'-phosphate
  modified_base 14: mod_base = OTHER; note = adenosine-3'-phosphate
  modified_base 15: mod_base = OTHER; note = 2'-O-methyluridine-3'-phosphate
  modified_base 16: mod_base = OTHER; note = adenosine-3'-phosphate
  modified_base 17: mod_base = OTHER; note = uridine-3'-phosphate
  modified_base 18: mod_base = OTHER; note = guanosine-3'-phosphate
  modified_base 19: mod_base = OTHER; note = adenosine-3'-phosphate
  modified_base 20: mod_base = OTHER; note = 2'-deoxythymidine-3'-phosphorothioate
  misc_feature 1..19: note = RNA
  misc_feature 20..21: note = DNA
tgttctgtatttgatatgatt

SEQ ID NO: 906 - DNA, 21 bp, synthetic construct
  source 1..21: mol_type = other DNA
  modified_base 1: mod_base = OTHER; note = adenosine-3'-phosphate
  modified_base 2: mod_base = OTHER; note = uridine-3'-phosphate
  modified_base 3: mod_base = OTHER; note = guanosine-3'-phosphate
  modified_base 4: mod_base = OTHER; note = uridine-3'-phosphate
  modified_base 5: mod_base = OTHER; note = uridine-3'-phosphate
  modified_base 6: mod_base = OTHER; note = cytidine-3'-phosphate
  modified_base 7: mod_base = OTHER; note = uridine-3'-phosphate
  modified_base 8: mod_base = OTHER; note = guanosine-3'-phosphate
  modified_base 9: mod_base = OTHER; note = 2'-O-methyluridine-3'-phosphate
  modified_base 10: mod_base = OTHER; note = adenosine-3'-phosphate
  modified_base 11: mod_base = OTHER; note = uridine-3'-phosphate
  modified_base 12: mod_base = OTHER; note = uridine-3'-phosphate
  modified_base 13: mod_base = OTHER; note = uridine-3'-phosphate
  modified_base 14: mod_base = OTHER; note = guanosine-3'-phosphate
  modified_base 15: mod_base = OTHER; note = adenosine-3'-phosphate
  modified_base 16: mod_base = OTHER; note = 2'-O-methyluridine-3'-phosphate
  modified_base 17: mod_base = OTHER; note = adenosine-3'-phosphate
  modified_base 18: mod_base = OTHER; note = uridine-3'-phosphate
  modified_base 19: mod_base = OTHER; note = guanosine-3'-phosphate
  modified_base 20: mod_base = OTHER; note = 2'-deoxythymidine-3'-phosphorothioate
  misc_feature 1..19: note = RNA
  misc_feature 20..21: note = DNA
atgttctgtatttgatatgtt

SEQ ID NO: 907 - DNA, 21 bp, synthetic construct
  source 1..21: mol_type = other DNA
  modified_base 1: mod_base = OTHER; note = adenosine-3'-phosphate
  modified_base 2: mod_base = OTHER; note = guanosine-3'-phosphate
  modified_base 3: mod_base = OTHER; note = guanosine-3'-phosphate
  modified_base 4: mod_base = OTHER; note = cytidine-3'-phosphate
  modified_base 5: mod_base = OTHER; note = uridine-3'-phosphate
  modified_base 6: mod_base = OTHER; note = 2'-O-methylcytidine-3'-phosphate
  modified_base 7: mod_base = OTHER; note = adenosine-3'-phosphate
  modified_base 8: mod_base = OTHER; note = adenosine-3'-phosphate
  modified_base 9: mod_base = OTHER; note = 2'-O-methylcytidine-3'-phosphate
  modified_base 10: mod_base = OTHER; note = adenosine-3'-phosphate
  modified_base 11: mod_base = OTHER; note = uridine-3'-phosphate
  modified_base 12: mod_base = OTHER; note = 2'-O-methyluridine-3'-phosphate
  modified_base 13: mod_base = OTHER; note = adenosine-3'-phosphate
  modified_base 14: mod_base = OTHER; note = guanosine-3'-phosphate
  modified_base 15: mod_base = OTHER; note = 2'-O-methylcytidine-3'-phosphate
  modified_base 16: mod_base = OTHER; note = adenosine-3'-phosphate
  modified_base 17: mod_base = OTHER; note = guanosine-3'-phosphate
  modified_base 18: mod_base = OTHER; note = guanosine-3'-phosphate
  modified_base 19: mod_base = OTHER; note = adenosine-3'-phosphate
  modified_base 20: mod_base = OTHER; note = 2'-deoxythymidine-3'-phosphorothioate
  misc_feature 1..19: note = RNA
  misc_feature 20..21: note = DNA
aggctcaacattagcaggatt

SEQ ID NO: 908 - DNA, 21 bp, synthetic construct
  source 1..21: mol_type = other DNA
  modified_base 1: mod_base = OTHER; note = uridine-3'-phosphate
  modified_base 2: mod_base = OTHER; note = uridine-3'-phosphate
  modified_base 3: mod_base = OTHER; note = cytidine-3'-phosphate
  modified_base 4: mod_base = OTHER; note = 2'-O-methylcytidine-3'-phosphate
  modified_base 5: mod_base = OTHER; note = adenosine-3'-phosphate
  modified_base 6: mod_base = OTHER; note = guanosine-3'-phosphate
  modified_base 7: mod_base = OTHER; note = guanosine-3'-phosphate
  modified_base 8: mod_base = OTHER; note = cytidine-3'-phosphate
  modified_base 9: mod_base = OTHER; note = uridine-3'-phosphate
  modified_base 10: mod_base = OTHER; note = 2'-O-methylcytidine-3'-phosphate
  modified_base 11: mod_base = OTHER; note = adenosine-3'-phosphate
  modified_base 12: mod_base = OTHER; note = adenosine-3'-phosphate
  modified_base 13: mod_base = OTHER; note = 2'-O-methylcytidine-3'-phosphate
  modified_base 14: mod_base = OTHER; note = adenosine-3'-phosphate
  modified_base 15: mod_base = OTHER; note = uridine-3'-phosphate
  modified_base 16: mod_base = OTHER; note = 2'-O-methyluridine-3'-phosphate
  modified_base 17: mod_base = OTHER; note = adenosine-3'-phosphate
  modified_base 18: mod_base = OTHER; note = guanosine-3'-phosphate
  modified_base 19: mod_base = OTHER; note = cytidine-3'-phosphate
  modified_base 20: mod_base = OTHER; note = 2'-deoxythymidine-3'-phosphorothioate
  misc_feature 1..19: note = RNA
  misc_feature 20..21: note = DNA
ttccaggctcaacattagctt

SEQ ID NO: 909 - DNA, 21 bp, synthetic construct
  source 1..21: mol_type = other DNA
  modified_base 1: mod_base = OTHER; note = adenosine-3'-phosphate
  modified_base 2: mod_base = OTHER; note = uridine-3'-phosphate
  modified_base 3: mod_base = OTHER; note = guanosine-3'-phosphate
  modified_base 4: mod_base = OTHER; note = 2'-O-methyluridine-3'-phosphate
  modified_base 5: mod_base = OTHER; note = adenosine-3'-phosphate
  modified_base 6: mod_base = OTHER; note = 2'-O-methylcytidine-3'-phosphate
  modified_base 7: mod_base = OTHER; note = adenosine-3'-phosphate
  modified_base 8: mod_base = OTHER; note = guanosine-3'-phosphate
  modified_base 9: mod_base = OTHER; note = uridine-3'-phosphate
  modified_base 10: mod_base = OTHER; note = uridine-3'-phosphate
  modified_base 11: mod_base = OTHER; note = cytidine-3'-phosphate
  modified_base 12: mod_base = OTHER; note = cytidine-3'-phosphate
  modified_base 13: mod_base = OTHER; note = uridine-3'-phosphate
  modified_base 14: mod_base = OTHER; note = 2'-O-methyluridine-3'-phosphate
  modified_base 15: mod_base = OTHER; note = adenosine-3'-phosphate
  modified_base 16: mod_base = OTHER; note = guanosine-3'-phosphate
  modified_base 17: mod_base = OTHER; note = guanosine-3'-phosphate
  modified_base 18: mod_base = OTHER; note = guanosine-3'-phosphate
  modified_base 19: mod_base = OTHER; note = adenosine-3'-phosphate
  modified_base 20: mod_base = OTHER; note = 2'-deoxythymidine-3'-phosphorothioate
  misc_feature 1..19: note = RNA
  misc_feature 20..21: note = DNA
atgtacagttccttagggatt

SEQ ID NO: 910 - DNA, 21 bp, synthetic construct
  source 1..21: mol_type = other DNA
  modified_base 1: mod_base = OTHER; note = 2'-O-methyluridine-3'-phosphate
  modified_base 2: mod_base = OTHER; note = adenosine-3'-phosphate
  modified_base 3: mod_base = OTHER; note = uridine-3'-phosphate
  modified_base 4: mod_base = OTHER; note = guanosine-3'-phosphate
  modified_base 5: mod_base = OTHER; note = 2'-O-methyluridine-3'-phosphate
  modified_base 6: mod_base = OTHER; note = adenosine-3'-phosphate
  modified_base 7: mod_base = OTHER; note = 2'-O-methylcytidine-3'-phosphate
  modified_base 8: mod_base = OTHER; note = adenosine-3'-phosphate
  modified_base 9: mod_base = OTHER; note = guanosine-3'-phosphate
  modified_base 10: mod_base = OTHER; note = uridine-3'-phosphate
  modified_base 11: mod_base = OTHER; note = uridine-3'-phosphate
  modified_base 12: mod_base = OTHER; note = cytidine-3'-phosphate
  modified_base 13: mod_base = OTHER; note = cytidine-3'-phosphate
  modified_base 14: mod_base = OTHER; note = uridine-3'-phosphate
  modified_base 15: mod_base = OTHER; note = 2'-O-methyluridine-3'-phosphate
  modified_base 16: mod_base = OTHER; note = adenosine-3'-phosphate
  modified_base 17: mod_base = OTHER; note = guanosine-3'-phosphate
  modified_base 18: mod_base = OTHER; note = guanosine-3'-phosphate
  modified_base 19: mod_base = OTHER; note = guanosine-3'-phosphate
  modified_base 20: mod_base = OTHER; note = 2'-deoxythymidine-3'-phosphorothioate
  misc_feature 1..19: note = RNA
  misc_feature 20..21: note = DNA
tatgtacagttccttagggtt

SEQ ID NO: 911 - DNA, 21 bp, synthetic construct
  source 1..21: mol_type = other DNA
  modified_base 1: mod_base = OTHER; note = uridine-3'-phosphate
  modified_base 2: mod_base = OTHER; note = guanosine-3'-phosphate
  modified_base 3: mod_base = OTHER; note = cytidine-3'-phosphate
  modified_base 4: mod_base = OTHER; note = 2'-O-methylcytidine-3'-phosphate
  modified_base 5: mod_base = OTHER; note = adenosine-3'-phosphate
  modified_base 6: mod_base = OTHER; note = uridine-3'-phosphate
  modified_base 7: mod_base = OTHER; note = guanosine-3'-phosphate
  modified_base 8: mod_base = OTHER; note = cytidine-3'-phosphate
  modified_base 9: mod_base = OTHER; note = uridine-3'-phosphate
  modified_base 10: mod_base = OTHER; note = cytidine-3'-phosphate
  modified_base 11: mod_base = OTHER; note = 2'-O-methyluridine-3'-phosphate
  modified_base 12: mod_base = OTHER; note = adenosine-3'-phosphate
  modified_base 13: mod_base = OTHER; note = uridine-3'-phosphate
  modified_base 14: mod_base = OTHER; note = 2'-O-methyluridine-3'-phosphate
  modified_base 15: mod_base = OTHER; note = adenosine-3'-phosphate
  modified_base 16: mod_base = OTHER; note = uridine-3'-phosphate
  modified_base 17: mod_base = OTHER; note = guanosine-3'-phosphate
  modified_base 18: mod_base = OTHER; note = 2'-O-methyluridine-3'-phosphate
  modified_base 19: mod_base = OTHER; note = adenosine-3'-phosphate
  modified_base 20: mod_base = OTHER; note = 2'-deoxythymidine-3'-phosphorothioate
  misc_feature 1..19: note = RNA
  misc_feature 20..21: note = DNA
tgccatgctctattatgtatt

SEQ ID NO: 912 - DNA, 21 bp, synthetic construct
  source 1..21: mol_type = other DNA
  modified_base 1: mod_base = OTHER; note = uridine-3'-phosphate
  modified_base 2: mod_base = OTHER; note = guanosine-3'-phosphate
  modified_base 3: mod_base = OTHER; note = cytidine-3'-phosphate
  modified_base 4: mod_base = OTHER; note = uridine-3'-phosphate
  modified_base 5: mod_base = OTHER; note = guanosine-3'-phosphate
  modified_base 6: mod_base = OTHER; note = cytidine-3'-phosphate
  modified_base 7: mod_base = OTHER; note = 2'-O-methylcytidine-3'-phosphate
  modified_base 8: mod_base = OTHER; note = adenosine-3'-phosphate
  modified_base 9: mod_base = OTHER; note = uridine-3'-phosphate
  modified_base 10: mod_base = OTHER; note = guanosine-3'-phosphate
  modified_base 11: mod_base = OTHER; note = cytidine-3'-phosphate
  modified_base 12: mod_base = OTHER; note = uridine-3'-phosphate
  modified_base 13: mod_base = OTHER; note = cytidine-3'-phosphate
  modified_base 14: mod_base = OTHER; note = 2'-O-methyluridine-3'-phosphate
  modified_base 15: mod_base = OTHER; note = adenosine-3'-phosphate
  modified_base 16: mod_base = OTHER; note = uridine-3'-phosphate
  modified_base 17: mod_base = OTHER; note = 2'-O-methyluridine-3'-phosphate
  modified_base 18: mod_base = OTHER; note = adenosine-3'-phosphate
  modified_base 19: mod_base = OTHER; note = uridine-3'-phosphate
  modified_base 20: mod_base = OTHER; note = 2'-deoxythymidine-3'-phosphorothioate
  misc_feature 1..19: note = RNA
  misc_feature 20..21: note = DNA
tgctgccatgctctattattt

SEQ ID NO: 913 - DNA, 21 bp, synthetic construct
  source 1..21: mol_type = other DNA
  modified_base 1: mod_base = OTHER; note = uridine-3'-phosphate
  modified_base 2: mod_base = OTHER; note = uridine-3'-phosphate
  modified_base 3: mod_base = OTHER; note = guanosine-3'-phosphate
  modified_base 4: mod_base = OTHER; note = cytidine-3'-phosphate
  modified_base 5: mod_base = OTHER; note = uridine-3'-phosphate
  modified_base 6: mod_base = OTHER; note = guanosine-3'-phosphate
  modified_base 7: mod_base = OTHER; note = cytidine-3'-phosphate
  modified_base 8: mod_base = OTHER; note = 2'-O-methylcytidine-3'-phosphate
  modified_base 9: mod_base = OTHER; note = adenosine-3'-phosphate
  modified_base 10: mod_base = OTHER; note = uridine-3'-phosphate
  modified_base 11: mod_base = OTHER; note = guanosine-3'-phosphate
  modified_base 12: mod_base = OTHER; note = cytidine-3'-phosphate
  modified_base 13: mod_base = OTHER; note = uridine-3'-phosphate
  modified_base 14: mod_base = OTHER; note = cytidine-3'-phosphate
  modified_base 15: mod_base = OTHER; note = 2'-O-methyluridine-3'-phosphate
  modified_base 16: mod_base = OTHER; note = adenosine-3'-phosphate
  modified_base 17: mod_base = OTHER; note = uridine-3'-phosphate
  modified_base 18: mod_base = OTHER; note = 2'-O-methyluridine-3'-phosphate
  modified_base 19: mod_base = OTHER; note = adenosine-3'-phosphate
  modified_base 20: mod_base = OTHER; note = 2'-deoxythymidine-3'-phosphorothioate
  misc_feature 1..19: note = RNA
  misc_feature 20..21: note = DNA
ttgctgccatgctctattatt

SEQ ID NO: 914 - DNA, 21 bp, synthetic construct
  source 1..21: mol_type = other DNA
  modified_base 1: mod_base = OTHER; note = adenosine-3'-phosphate
  modified_base 2: mod_base = OTHER; note = uridine-3'-phosphate
  modified_base 3: mod_base = OTHER; note = uridine-3'-phosphate
  modified_base 4: mod_base = OTHER; note = guanosine-3'-phosphate
  modified_base 5: mod_base = OTHER; note = cytidine-3'-phosphate
  modified_base 6: mod_base = OTHER; note = uridine-3'-phosphate
  modified_base 7: mod_base = OTHER; note = guanosine-3'-phosphate
  modified_base 8: mod_base = OTHER; note = cytidine-3'-phosphate
  modified_base 9: mod_base = OTHER; note = 2'-O-methylcytidine-3'-phosphate
  modified_base 10: mod_base = OTHER; note = adenosine-3'-phosphate
  modified_base 11: mod_base = OTHER; note = uridine-3'-phosphate
  modified_base 12: mod_base = OTHER; note = guanosine-3'-phosphate
  modified_base 13: mod_base = OTHER; note = cytidine-3'-phosphate
  modified_base 14: mod_base = OTHER; note = uridine-3'-phosphate
  modified_base 15: mod_base = OTHER; note = cytidine-3'-phosphate
  modified_base 16: mod_base = OTHER; note = 2'-O-methyluridine-3'-phosphate
  modified_base 17: mod_base = OTHER; note = adenosine-3'-phosphate
  modified_base 18: mod_base = OTHER; note = uridine-3'-phosphate
  modified_base 19: mod_base = OTHER; note = uridine-3'-phosphate
  modified_base 20: mod_base = OTHER; note = 2'-deoxythymidine-3'-phosphorothioate
  misc_feature 1..19: note = RNA
  misc_feature 20..21: note = DNA
attgctgccatgctctatttt

SEQ ID NO: 915 - DNA, 21 bp, synthetic construct
  source 1..21: mol_type = other DNA
  modified_base 1: mod_base = OTHER; note = adenosine-3'-phosphate
  modified_base 2: mod_base = OTHER; note = adenosine-3'-phosphate
  modified_base 3: mod_base = OTHER; note = adenosine-3'-phosphate
  modified_base 4: mod_base = OTHER; note = guanosine-3'-phosphate
  modified_base 5: mod_base = OTHER; note = uridine-3'-phosphate
  modified_base 6: mod_base = OTHER; note = uridine-3'-phosphate
  modified_base 7: mod_base = OTHER; note = guanosine-3'-phosphate
  modified_base 8: mod_base = OTHER; note = 2'-O-methylcytidine-3'-phosphate
  modified_base 9: mod_base = OTHER; note = adenosine-3'-phosphate
  modified_base 10: mod_base = OTHER; note = uridine-3'-phosphate
  modified_base 11: mod_base = OTHER; note = uridine-3'-phosphate
  modified_base 12: mod_base = OTHER; note = cytidine-3'-phosphate
  modified_base 13: mod_base = OTHER; note = 2'-O-methylcytidine-3'-phosphate
  modified_base 14: mod_base = OTHER; note = adenosine-3'-phosphate
  modified_base 15: mod_base = OTHER; note = guanosine-3'-phosphate
  modified_base 16: mod_base = OTHER; note = guanosine-3'-phosphate
  modified_base 17: mod_base = OTHER; note = guanosine-3'-phosphate
  modified_base 18: mod_base = OTHER; note = uridine-3'-phosphate
  modified_base 19: mod_base = OTHER; note = cytidine-3'-phosphate
  modified_base 20: mod_base = OTHER; note = 2'-deoxythymidine-3'-phosphorothioate
  misc_feature 1..19: note = RNA
  misc_feature 20..21: note = DNA
aaagttgcattccagggtctt

SEQ ID NO: 916 - DNA, 21 bp, synthetic construct
  source 1..21: mol_type = other DNA
  modified_base 1: mod_base = OTHER; note = uridine-3'-phosphate
  modified_base 2: mod_base = OTHER; note = guanosine-3'-phosphate
  modified_base 3: mod_base = OTHER; note = 2'-O-methylcytidine-3'-phosphate
  modified_base 4: mod_base = OTHER; note = adenosine-3'-phosphate
  modified_base 5: mod_base = OTHER; note = adenosine-3'-phosphate
  modified_base 6: mod_base = OTHER; note = adenosine-3'-phosphate
  modified_base 7: mod_base = OTHER; note = cytidine-3'-phosphate
  modified_base 8: mod_base = OTHER; note = uridine-3'-phosphate
  modified_base 9: mod_base = OTHER; note = guanosine-3'-phosphate
  modified_base 10: mod_base = OTHER; note = guanosine-3'-phosphate
  modified_base 11: mod_base = OTHER; note = cytidine-3'-phosphate
  modified_base 12: mod_base = OTHER; note = uridine-3'-phosphate
  modified_base 13: mod_base = OTHER; note = guanosine-3'-phosphate
  modified_base 14: mod_base = OTHER; note = uridine-3'-phosphate
  modified_base 15: mod_base = OTHER; note = 2'-O-methyluridine-3'-phosphate
  modified_base 16: mod_base = OTHER; note = adenosine-3'-phosphate
  modified_base 17: mod_base = OTHER; note = uridine-3'-phosphate
  modified_base 18: mod_base = OTHER; note = uridine-3'-phosphate
  modified_base 19: mod_base = OTHER; note = guanosine-3'-phosphate
  modified_base 20: mod_base = OTHER; note = 2'-deoxythymidine-3'-phosphorothioate
  misc_feature 1..19: note = RNA
  misc_feature 20..21: note = DNA
tgcaaactggctgttattgtt

SEQ ID NO: 917 - DNA, 21 bp, synthetic construct
  source 1..21: mol_type = other DNA
  modified_base 1: mod_base = OTHER; note = uridine-3'-phosphate
  modified_base 2: mod_base = OTHER; note = uridine-3'-phosphate
  modified_base 3: mod_base = OTHER; note = uridine-3'-phosphate
  modified_base 4: mod_base = OTHER; note = guanosine-3'-phosphate
  modified_base 5: mod_base = OTHER; note = 2'-O-methylcytidine-3'-phosphate
  modified_base 6: mod_base = OTHER; note = adenosine-3'-phosphate
  modified_base 7: mod_base = OTHER; note = adenosine-3'-phosphate
  modified_base 8: mod_base = OTHER; note = adenosine-3'-phosphate
  modified_base 9: mod_base = OTHER; note = cytidine-3'-phosphate
  modified_base 10: mod_base = OTHER; note = uridine-3'-phosphate
  modified_base 11: mod_base = OTHER; note = guanosine-3'-phosphate
  modified_base 12: mod_base = OTHER; note = guanosine-3'-phosphate
  modified_base 13: mod_base = OTHER; note = cytidine-3'-phosphate
  modified_base 14: mod_base = OTHER; note = uridine-3'-phosphate
  modified_base 15: mod_base = OTHER; note = guanosine-3'-phosphate
  modified_base 16: mod_base = OTHER; note = uridine-3'-phosphate
  modified_base 17: mod_base = OTHER; note = 2'-O-methyluridine-3'-phosphate
  modified_base 18: mod_base = OTHER; note = adenosine-3'-phosphate
  modified_base 19: mod_base = OTHER; note = uridine-3'-phosphate
  modified_base 20: mod_base = OTHER; note = 2'-deoxythymidine-3'-phosphorothioate
  misc_feature 1..19: note = RNA
  misc_feature 20..21: note = DNA
tttgcaaactggctgttattt

SEQ ID NO: 918 - DNA, 21 bp, synthetic construct
  source 1..21: mol_type = other DNA
  modified_base 1: mod_base = OTHER; note = uridine-3'-phosphate
  modified_base 2: mod_base = OTHER; note = guanosine-3'-phosphate
  modified_base 3: mod_base = OTHER; note = guanosine-3'-phosphate
  modified_base 4: mod_base = OTHER; note = adenosine-3'-phosphate
  modified_base 5: mod_base = OTHER; note = cytidine-3'-phosphate
  modified_base 6: mod_base = OTHER; note = uridine-3'-phosphate
  modified_base 7: mod_base = OTHER; note = uridine-3'-phosphate
  modified_base 8: mod_base = OTHER; note = guanosine-3'-phosphate
  modified_base 9: mod_base = OTHER; note = adenosine-3'-phosphate
  modified_base 10: mod_base = OTHER; note = guanosine-3'-phosphate
  modified_base 11: mod_base = OTHER; note = guanosine-3'-phosphate
  modified_base 12: mod_base = OTHER; note = 2'-O-methyluridine-3'-phosphate
  modified_base 13: mod_base = OTHER; note = adenosine-3'-phosphate
  modified_base 14: mod_base = OTHER; note = uridine-3'-phosphate
  modified_base 15: mod_base = OTHER; note = guanosine-3'-phosphate
  modified_base 16: mod_base = OTHER; note = uridine-3'-phosphate
  modified_base 17: mod_base = OTHER; note = guanosine-3'-phosphate
  modified_base 18: mod_base = OTHER; note = guanosine-3'-phosphate
  modified_base 19: mod_base = OTHER; note = adenosine-3'-phosphate
  modified_base 20: mod_base = OTHER; note = 2'-deoxythymidine-3'-phosphorothioate
  misc_feature 1..19: note = RNA
  misc_feature 20..21: note = DNA
tggacttgaggtatgtggatt

SEQ ID NO: 919 - DNA, 21 bp, synthetic construct
  source 1..21: mol_type = other DNA
  modified_base 1: mod_base = OTHER; note = 2'-O-methyluridine-3'-phosphate
  modified_base 2: mod_base = OTHER; note = adenosine-3'-phosphate
  modified_base 3: mod_base = OTHER; note = guanosine-3'-phosphate
  modified_base 4: mod_base = OTHER; note = adenosine-3'-phosphate
  modified_base 5: mod_base = OTHER; note = uridine-3'-phosphate
  modified_base 6: mod_base = OTHER; note = guanosine-3'-phosphate
  modified_base 7: mod_base = OTHER; note = adenosine-3'-phosphate
  modified_base 8: mod_base = OTHER; note = uridine-3'-phosphate
  modified_base 9: mod_base = OTHER; note = 2'-O-methyluridine-3'-phosphate
  modified_base 10: mod_base = OTHER; note = adenosine-3'-phosphate
  modified_base 11: mod_base = OTHER; note = uridine-3'-phosphate
  modified_base 12: mod_base = OTHER; note = guanosine-3'-phosphate
  modified_base 13: mod_base = OTHER; note = 2'-O-methylcytidine-3'-phosphate
  modified_base 14: mod_base = OTHER; note = adenosine-3'-phosphate
  modified_base 15: mod_base = OTHER; note = uridine-3'-phosphate
  modified_base 16: mod_base = OTHER; note = uridine-3'-phosphate
  modified_base 17: mod_base = OTHER; note = guanosine-3'-phosphate
  modified_base 18: mod_base = OTHER; note = guanosine-3'-phosphate
  modified_base 19: mod_base = OTHER; note = uridine-3'-phosphate
  modified_base 20: mod_base = OTHER; note = 2'-deoxythymidine-3'-phosphorothioate
  misc_feature 1..19: note = RNA
  misc_feature 20..21: note = DNA
tagatgattatgcattggttt

SEQ ID NO: 920 - DNA, 21 bp, synthetic construct
  source 1..21: mol_type = other DNA
  modified_base 1: mod_base = OTHER; note = adenosine-3'-phosphate
  modified_base 2: mod_base = OTHER; note = guanosine-3'-phosphate
  modified_base 3: mod_base = OTHER; note = uridine-3'-phosphate
  modified_base 4: mod_base = OTHER; note = 2'-O-methylcytidine-3'-phosphate
  modified_base 5: mod_base = OTHER; note = adenosine-3'-phosphate
  modified_base 6: mod_base = OTHER; note = guanosine-3'-phosphate
  modified_base 7: mod_base = OTHER; note = guanosine-3'-phosphate
  modified_base 8: mod_base = OTHER; note = 2'-O-methyluridine-3'-phosphate
  modified_base 9: mod_base = OTHER; note = adenosine-3'-phosphate
  modified_base 10: mod_base = OTHER; note = cytidine-3'-phosphate
  modified_base 11: mod_base = OTHER; note = uridine-3'-phosphate
  modified_base 12: mod_base = OTHER; note = uridine-3'-phosphate
  modified_base 13: mod_base = OTHER; note = guanosine-3'-phosphate
  modified_base 14: mod_base = OTHER; note = 2'-O-methyluridine-3'-phosphate
  modified_base 15: mod_base = OTHER; note = adenosine-3'-phosphate
  modified_base 16: mod_base = OTHER; note = guanosine-3'-phosphate
  modified_base 17: mod_base = OTHER; note = uridine-3'-phosphate
  modified_base 18: mod_base = OTHER; note = cytidine-3'-phosphate
  modified_base 19: mod_base = OTHER; note = cytidine-3'-phosphate
  modified_base 20: mod_base = OTHER; note = 2'-deoxythymidine-3'-phosphorothioate
  misc_feature 1..19: note = RNA
  misc_feature 20..21: note = DNA
agtcaggtacttgtagtcctt

SEQ ID NO: 921 - DNA, 21 bp, synthetic construct
  source 1..21: mol_type = other DNA
  modified_base 1: mod_base = OTHER; note = adenosine-3'-phosphate
  modified_base 2: mod_base = OTHER; note = guanosine-3'-phosphate
  modified_base 3: mod_base = OTHER; note = adenosine-3'-phosphate
  modified_base 4: mod_base = OTHER; note = guanosine-3'-phosphate
  modified_base 5: mod_base = OTHER; note = uridine-3'-phosphate
  modified_base 6: mod_base = OTHER; note = 2'-O-methylcytidine-3'-phosphate
  modified_base 7: mod_base = OTHER; note = adenosine-3'-phosphate
  modified_base 8: mod_base = OTHER; note = guanosine-3'-phosphate
  modified_base 9: mod_base = OTHER; note = guanosine-3'-phosphate
  modified_base 10: mod_base = OTHER; note = 2'-O-methyluridine-3'-phosphate
  modified_base 11: mod_base = OTHER; note = adenosine-3'-phosphate
  modified_base 12: mod_base = OTHER; note = cytidine-3'-phosphate
  modified_base 13: mod_base = OTHER; note = uridine-3'-phosphate
  modified_base 14: mod_base = OTHER; note = uridine-3'-phosphate
  modified_base 15: mod_base = OTHER; note = guanosine-3'-phosphate
  modified_base 16: mod_base = OTHER; note = 2'-O-methyluridine-3'-phosphate
  modified_base 17: mod_base = OTHER; note = adenosine-3'-phosphate
  modified_base 18: mod_base = OTHER; note = guanosine-3'-phosphate
  modified_base 19: mod_base = OTHER; note = uridine-3'-phosphate
  modified_base 20: mod_base = OTHER; note = 2'-deoxythymidine-3'-phosphorothioate
  misc_feature 1..19: note = RNA
  misc_feature 20..21: note = DNA
agagtcaggtacttgtagttt

SEQ ID NO: 922 - DNA, 21 bp, synthetic construct
  source 1..21: mol_type = other DNA
  modified_base 1: mod_base = OTHER; note = uridine-3'-phosphate
  modified_base 2: mod_base = OTHER; note = cytidine-3'-phosphate
  modified_base 3: mod_base = OTHER; note = cytidine-3'-phosphate
  modified_base 4: mod_base = OTHER; note = uridine-3'-phosphate
  modified_base 5: mod_base = OTHER; note = guanosine-3'-phosphate
  modified_base 6: mod_base = OTHER; note = 2'-O-methyluridine-3'-phosphate
  modified_base 7: mod_base = OTHER; note = adenosine-3'-phosphate
  modified_base 8: mod_base = OTHER; note = guanosine-3'-phosphate
  modified_base 9: mod_base = OTHER; note = guanosine-3'-phosphate
  modified_base 10: mod_base = OTHER; note = adenosine-3'-phosphate
  modified_base 11: mod_base = OTHER; note = adenosine-3'-phosphate
  modified_base 12: mod_base = OTHER; note = guanosine-3'-phosphate
  modified_base 13: mod_base = OTHER; note = cytidine-3'-phosphate
  modified_base 14: mod_base = OTHER; note = uridine-3'-phosphate
  modified_base 15: mod_base = OTHER; note = uridine-3'-phosphate
  modified_base 16: mod_base = OTHER; note = uridine-3'-phosphate
  modified_base 17: mod_base = OTHER; note = guanosine-3'-phosphate
  modified_base 18: mod_base = OTHER; note = adenosine-3'-phosphate
  modified_base 19: mod_base = OTHER; note = cytidine-3'-phosphate
  modified_base 20: mod_base = OTHER; note = 2'-deoxythymidine-3'-phosphorothioate
  misc_feature 1..19: note = RNA
  misc_feature 20..21: note = DNA
tcctgtaggaagctttgactt

SEQ ID NO: 923 - DNA, 21 bp, synthetic construct
  source 1..21: mol_type = other DNA
  modified_base 1: mod_base = OTHER; note = adenosine-3'-phosphate
  modified_base 2: mod_base = OTHER; note = adenosine-3'-phosphate
  modified_base 3: mod_base = OTHER; note = cytidine-3'-phosphate
  modified_base 4: mod_base = OTHER; note = cytidine-3'-phosphate
  modified_base 5: mod_base = OTHER; note = uridine-3'-phosphate
  modified_base 6: mod_base = OTHER; note = uridine-3'-phosphate
  modified_base 7: mod_base = OTHER; note = 2'-O-methyluridine-3'-phosphate
  modified_base 8: mod_base = OTHER; note = adenosine-3'-phosphate
  modified_base 9: mod_base = OTHER; note = guanosine-3'-phosphate
  modified_base 10: mod_base = OTHER; note = guanosine-3'-phosphate
  modified_base 11: mod_base = OTHER; note = adenosine-3'-phosphate
  modified_base 12: mod_base = OTHER; note = uridine-3'-phosphate
  modified_base 13: mod_base = OTHER; note = guanosine-3'-phosphate
  modified_base 14: mod_base = OTHER; note = uridine-3'-phosphate
  modified_base 15: mod_base = OTHER; note = guanosine-3'-phosphate
  modified_base 16: mod_base = OTHER; note = adenosine-3'-phosphate
  modified_base 17: mod_base = OTHER; note = guanosine-3'-phosphate
  modified_base 18: mod_base = OTHER; note = uridine-3'-phosphate
  modified_base 19: mod_base = OTHER; note = guanosine-3'-phosphate
  modified_base 20: mod_base = OTHER; note = 2'-deoxythymidine-3'-phosphorothioate
  misc_feature 1..19: note = RNA
  misc_feature 20..21: note = DNA
aacctttaggatgtgagtgtt

SEQ ID NO: 924 - DNA, 21 bp, synthetic construct
  source 1..21: mol_type = other DNA
  modified_base 1: mod_base = OTHER; note = uridine-3'-phosphate
  modified_base 2: mod_base = OTHER; note = guanosine-3'-phosphate
  modified_base 3: mod_base = OTHER; note = guanosine-3'-phosphate
  modified_base 4: mod_base = OTHER; note = adenosine-3'-phosphate
  modified_base 5: mod_base = OTHER; note = adenosine-3'-phosphate
  modified_base 6: mod_base = OTHER; note = cytidine-3'-phosphate
  modified_base 7: mod_base = OTHER; note = cytidine-3'-phosphate
  modified_base 8: mod_base = OTHER; note = uridine-3'-phosphate
  modified_base 9: mod_base = OTHER; note = uridine-3'-phosphate
  modified_base 10: mod_base = OTHER; note = 2'-O-methyluridine-3'-phosphate
  modified_base 11: mod_base = OTHER; note = adenosine-3'-phosphate
  modified_base 12: mod_base = OTHER; note = guanosine-3'-phosphate
  modified_base 13: mod_base = OTHER; note = guanosine-3'-phosphate
  modified_base 14: mod_base = OTHER; note = adenosine-3'-phosphate
  modified_base 15: mod_base = OTHER; note = uridine-3'-phosphate
  modified_base 16: mod_base = OTHER; note = guanosine-3'-phosphate
  modified_base 17: mod_base = OTHER; note = uridine-3'-phosphate
  modified_base 18: mod_base = OTHER; note = guanosine-3'-phosphate
  modified_base 19: mod_base = OTHER; note = adenosine-3'-phosphate
  modified_base 20: mod_base = OTHER; note = 2'-deoxythymidine-3'-phosphorothioate
  misc_feature 1..19: note = RNA
  misc_feature 20..21: note = DNA
tggaacctttaggatgtgatt

SEQ ID NO: 925 - protein, 6 aa, synthetic construct
  REGION 1..6: note = Description of Artificial Sequence: Synthetic peptide
RRKRRR
